(19) United States
(12) Patent Application Publication
(10) Pub. No.: US 2024/0066116 A1
(43) Pub. Date: Feb. 29, 2024

(54) FULLY SYNTHETIC, LONG-CHAIN NUCLEIC ACID FOR VACCINE PRODUCTION TO PROTECT AGAINST CORONAVIRUSES

(71) Applicant: ROCKETVAX AG, Basel (CH)

(72) Inventors: Matthias CHRISTEN, Reinach (CH); Natasa CMILJANOVIC VRANIC, Basel (CH); Vladimir CMILJANOVIC, Giebenach (CH)

(73) Assignee: ROCKETVAX AG, Basel (CH)

(21) Appl. No.: 18/280,150

(22) PCT Filed: Sep. 9, 2021
(86) PCT No.: PCT/EP2021/074738

§ 371 Date: Sep. 1, 2023

(30) Foreign Application Priority Data
Mar. 3, 2021 (WO) PCT/EP2021/055401

(51) Int. Cl. A61K 39/215; C07K 14/005; C12N 7/00; C12N 15/70

(52) U.S. Cl. CPC A61K 39/215; C07K 14/005; C12N 7/00; C12N 15/70; C12N 2770/20022; C12N 2770/20034; C12N 2770/20052; C12N 2800/101

(57) ABSTRACT

This invention describes a fully synthetic, long-chain nucleic acid that can be used in biotechnological manufacturing processes to produce envelope proteins, virus envelopes and fragments of virus envelopes of SARS-CoV-2 and related coronaviruses in highly purified form, which, as a vaccine protect against COVID-19 and other viral diseases

[0001] The present invention relates to a fully synthetic, long-chain nucleic acid according to the independent claim 1. The invention further relates to a kit comprising two or more of these nucleic acids and a biotechnological production unit comprising at least one plasmid comprising the nucleic acid. The invention further relates to a virus envelope, a fragment of a virus envelope and/or a virus envelope protein obtainable by gene expression using said nucleic acid. Furthermore, the invention concerns a vaccine comprising products obtainable by gene expression using the nucleic acid, in particular a vaccine against the coronavirus SARS-CoV-2, as well as a method for producing the vaccine.

[0002] The rapid development and availability of vaccines is crucial in combating many viruses and bacteria. The production of suitable vaccines is a multi-stage, complex process and is not always successful despite often high investments. Typically, the development of a suitable vaccine takes years. These long development times consist of a major problem, especially with regard to new emerging pathogens, or mutated pathogens, as from an epidemiological point of view it is only possible to react too late, if at all, to the emergence of new diseases. In contrast, the analysis, identification and further detection of new or heavily mutated pathogens are now possible within weeks or even days, which is a huge improvement over the last century.

[0003] In this context, viruses are of special interest, as they harbor high mutation rates causing the spread from other species to humans. Rapid spreading of these viruses makes them a major challenge for modern medicine. The usual time today (2020) between the detection/identification of a newly emerging virus and the development of a vaccine is typically years. In a few cases, with sufficient prior knowledge, experimental vaccines could be provided within months. However, this time span is much longer than the typical time until thousands or millions of people are infected. Such rapid spread is also a direct consequence of the high mobility of today's society.

[0004] Ideally, immediately after the identification of a new virus, a vaccine would be available in sufficient quantity and of the highest quality and would allow for a nationwide vaccination of all persons who have somehow come close to the initial outbreak site of the new virus. Furthermore, an ideal method for such a vaccine would be capable of reacting to the evolution and adaptation of the virus. Such an ideal production possibility seems utopian to the person skilled in the art today.

[0005] In the recent past in particular, the corona pandemic has dramatically increased the relevance of developing suitable tools for vaccine production. There is unanimous agreement that the development of a vaccine against the coronavirus SARS-CoV-2 is the only proven means of containing the pandemic and the associated global crisis in the long term.

[0006] In this background, the task of the present invention is to provide an instrument which allows the production of a vaccine against the coronavirus SARS-CoV-2, in large quantities and of high quality.

[0007] The problem is solved by a fully synthetic, long-chain nucleic acid according to claim 1. Preferred embodiments of the invention are reflected in the embodiments and dependent claims.

[0008] Accordingly, the invention relates to, inter alia, the following embodiments:
[0009] 1. Fully synthetic, long-chain nucleic acid with at least 4,000 bases, characterised in that the nucleic acid
   [0010] comprises
   [0011] a) at least two of the four sequence parts A-D in any arrangement, wherein i) Sequence part A comprises
   [0012] a) a sequence as defined in SEQ. ID. 50 or a sequence having at least 98.5% sequence identity to the sequence as defined in SEQ. ID. 50; or
   [0013] b) a sequence as defined in SEQ. ID. 3 or a sequence having at least 90% sequence identity to the sequence as defined in SEQ. ID. 3;
   [0014] ii) Sequence part B comprises
   [0015] a) a sequence as defined in SEQ. ID. 48 or a sequence having at least 98.3% sequence identity to the sequence as defined in SEQ. ID. 48; or
   [0016] b) a sequence as defined in SEQ. ID. 7 or a sequence having at least 90% sequence identity to the sequence as defined in SEQ. ID. 7;
   [0017] iii) Sequence part C comprises
   [0018] a) a sequence as defined in SEQ. ID. 49 or a sequence having at least 97.2% sequence identity to the sequence as defined in SEQ. ID. 49; or
   [0019] b) a sequence as defined in SEQ. ID. 11 or a sequence having at least 90% sequence identity to the sequence as defined in SEQ. ID. 11;
   [0020] iv) Sequence part D comprises a sequence as defined in SEQ. ID. 17 or a sequence having at least 98.5% sequence identity to the sequence as defined in SEQ. ID. 17; or encompasses a ribonucleic acid sequence corresponding to the deoxyribonucleic acid sequence according to the sequence parts A-D; and
   [0021] b) does not comprise
   [0022] 1.) a nucleic acid sequence part encodes an amino acid sequence having the function of a SARS-CoV-2 amino acid sequence encoded by ORF7a; and/or
   [0023] 2.) a nucleic acid sequence part encodes an amino acid sequence having the function of a SARS-CoV-2 amino acid sequence encoded by ORF3a.
[0024] 2. The nucleic acid according to embodiment 1, characterized in that it has at least 8′000 bases, preferably at least 20′000 bases, in a defined sequence.
[0025] 3. The nucleic acid according embodiment 1 or 2, characterized in that the nucleic acid comprises not more than one or no ORF-associated nucleic acid sequence parts, wherein the ORF-associated nucleic acid sequence part encodes an amino acid sequence having the function of a SARS-CoV-2 amino acid sequence encoded by ORF6 or ORF8.
[0026] 4. The nucleic acid according to embodiment 3, wherein the nucleic acid comprises no ORF-associated nucleic acid sequence part, wherein the ORF-associated nucleic acid sequence part encodes an amino acid sequence having the function of a SARS-CoV-2 amino acid sequence encoded by ORF6 or ORF8.
[0027] 5. The nucleic acid according to one of the preceding embodiments, wherein the nucleic acid additionally comprises
   [0028] a) 1.) an ORF1ab sequence defined by the SEQ. ID. 51 or a sequence having at least 98,5% sequence identity to SEQ. ID. 51; or
   [0029] 2.) i) an ORF1b sequence defined by the SEQ. ID. 59 or a sequence having at least 98,5% sequence identity to SEQ. ID. 59; and
   [0030] ii) a n ORF1a sequence defined by the SEQ. ID. 58 or a sequence having at least 98,6% sequence identity to SEQ. ID. 58; and
   [0031] b) an ORF3a sequence defined by the SEQ. ID. 52 or a sequence having at least 99% sequence identity to SEQ. ID 52.
[0032] 6. The nucleic acid according to embodiment 7, wherein the nucleic acid additionally comprises
   [0033] a) an ORF6 sequence defined by the SEQ. ID. 53 or a sequence having at least 94,1% sequence identity to SEQ. ID 53; and/or
   [0034] b) an ORF8 sequence defined by the SEQ. ID. 55 or a sequence having at least 99% sequence identity to SEQ. ID 55.
[0035] 7. The nucleic acid according to one of the preceding embodiments, characterized in that sequence parts A to C correspond to the sequence according to SEQ. ID. 19 or the corresponding ribonucleic acid sequence.
[0036] 8. The nucleic acid according to any of the preceding embodiments, characterized in that the nucleic acid comprises in any arrangement at least three of the four sequence parts A-D or at least three of four sequence parts with a ribonucleic acid sequence corresponding to the deoxyribonucleic acid sequence according to the sequence parts A-D.
[0037] 9. The nucleic acid according to any of the preceding embodiments, characterized in that the nucleic acid comprises in any arrangement the four sequence parts A-D or four sequence parts with a ribonucleic acid sequence corresponding to the deoxyribonucleic acid sequence according to the sequence parts A-D.
[0038] 10. The nucleic acid according to any one of embodiments 1 to 6, characterized in that the nucleic acid comprises two or three of the four sequence parts A-D.
[0039] 11. The nucleic acid according to embodiment 10, characterized in that the nucleic acid comprises three of the four sequence parts A-D.
[0040] 12. The nucleic acid according to one of the preceding embodiments, characterized in that the nucleic acid additionally comprises at least one sequence consisting of
   [0041] SEQ. ID. 15
   [0042] SEQ. ID. 28
   [0043] SEQ. ID. 29 and
   [0044] SEQ. ID. 30
   [0045] or comprises one of the deoxyribonucleic acid sequences according to the sequence parts SEQ. ID. 15, SEQ. ID. 28, SEQ. ID. 29 and SEQ. ID. 30 or the corresponding ribonucleic acid sequence.
[0046] 13. The nucleic acid according to one of the preceding embodiments, characterized in that it has a maximum size of 1′000′000 bases, preferably a maximum size of 200′000 bases.
[0047] 14. A vector comprising the nucleic acid according to one of the preceding embodiments.
[0048] 15. The vector according to embodiment 14, wherein the vector comprises the sequences defined by the SEQ. ID. 46 and SEQ. ID. 47.
[0049] 16. The vector according to any one of the embodiments 14 to 15, wherein the vector is a plasm id vector.
[0050] 17. A kit comprising two or more nucleic acids according to one of embodiments 1 to 13.
[0051] 18. The kit according to embodiment 17, wherein the nucleic acids are present in at least one plasmid, preferably in two or more plasm ids.
[0052] 19. A biotechnological production unit comprising at least one vector according to embodiments 14 to 16.
[0053] 20. A virus envelope, a fragment of a virus envelope and/or virus envelope protein obtainable by gene expression using at least one nucleic acid according to one of embodiments 1 to 3, using the vector according to one of embodiments 14 to 16, using the kit according to one of embodiments 17 or 18, or the biotechnological production unit according to embodiment 19, wherein the virus envelope, the fragment of a virus envelope and/or the virus envelope protein package the at least one nucleic acid according to one of embodiments 1 to 13.
[0054] 21. A vaccine against the coronavirus SARS-CoV-2 comprising at least one nucleic acid according to one of embodiments 1 to 13 and products obtainable by gene expression using at least one nucleic acid according to one of the embodiments 1 to 13, using the vector according to one of embodiments 14 to 16, using the kit according to one of the embodiments 17 or 18 in a production organism, in particular comprising the virus envelope, the fragment of a virus envelope and/or the virus envelope protein according to embodiment 20.
[0055] 22. The vaccine according to embodiment 21 comprising at least two molecularly precisely defined protein components selected from the group consisting of the protein components a, b1, b2, c1, c2, d1 or d2, wherein
   [0056] (i) the protein component a comprises
   [0057] a) the sequence according to SEQ. ID. 14 analogous to the S protein of SARS-CoV-2 or a sequence having at least 90% sequence identity to SEQ. ID. 14; or b) the sequence according to SEQ. ID. 18 analogous to the S protein of SARS-CoV-2 or sequence having at least 90% sequence identity to SEQ. ID.18;
   [0058] (ii) the protein component b1 comprises
   [0059] a) the sequence according to SEQ. ID. 6 analogous to the envelope protein E of SARS-CoV-2 or a sequence having at least 90% sequence identity to SEQ. ID.6; or
   [0060] b) the sequence according to SEQ. ID. 21 analogous to the envelope protein E of SARS-CoV-2 or a sequence having at least 90% sequence identity to SEQ. ID.21; and
   [0061] the protein component b2 comprises the sequence according to SEQ. ID. 8 analogous to the envelope protein E of MHV59A or an equivalent protein comprising a sequence having at least 90% sequence identity to SEQ. ID.8;
   [0062] (iii) the protein component c1 comprises
   [0063] a) the sequence according to SEQ. ID. 10 analogous to the envelope protein M of SARS-CoV-2 or a sequence having at least 90% sequence identity to SEQ. ID. 10; or
   [0064] b) the sequence according to SEQ. ID. 22 analogous to the membrane protein M of SARS-CoV-2 or a sequence having at least 90% sequence identity to SEQ. ID.22; and
   [0065] the protein component c2 comprises the sequence according to SEQ. ID. 12 analogous to membrane protein M of MHV59A or an equivalent protein comprising a sequence having at least 90% sequence identity to SEQ. ID. 12; and
   [0066] (iv) the protein component d1 comprises
   [0067] a) the sequence according to SEQ. ID. 2 analogous to the nucleocapsid phosphoprotein N of SARS-CoV-2 or a sequence having at least 90% sequence identity to SEQ. ID. 2; or
   [0068] b) the sequence according to SEQ. ID. 26 analogous to the nucleocapsid phosphoprotein N of SARS-CoV-2 or a sequence having at least 90% sequence identity to SEQ. ID. 26; and the protein component d2 the sequence according to SEQ. ID. 4 analogous to the nucleocapsid phosphoprotein N of MHV59A or an equivalent protein comprising a sequence having at least 90% sequence identity to SEQ. ID. 4.
[0069] 23. A method for the production of the vaccine a vaccine against the coronavirus SARS-CoV-2 comprising the successive steps of
   [0070] a) introducing the nucleotide acid sequence according to one of embodiments 1 to 13 into a biotechnological production unit, in particular a cell line, wherein, the nucleic acid-based mRNA coding for at least two of the protein components selected from the group consisting of the protein components a, b1, b2, c1, c2, d1 or d2 are prepared by translation;
   [0071] b) obtaining protein components from the biotechnological production unit in step a); and
   [0072] c) purifying the obtained protein components to obtain the vaccine against the coronavirus SARS-CoV-2.
[0073] 24. A method for the production of a vaccine against the coronavirus SARS-CoV-2 comprising the virus envelope, the fragment of a virus envelope and/or the virus envelope protein according to embodiment 20 comprising the successive steps of:
   [0074] a) introducing the nucleotide acid sequence according to one of embodiments 1 to 13 into a biotechnological production unit, wherein the biotechnological production unit comprises a nucleotide acid coding for at least one of the protein components selected from the group consisting of the protein components a, b1, c1, and d1.
   [0075] b) obtaining a fragment of a virus envelope and/or virus envelope protein from the biotechnological production unit in step a); and
   [0076] c) purifying the obtained protein components to obtain the vaccine against the coronavirus SARS-CoV-2 comprising the virus envelope, the fragment of a virus envelope and/or the virus envelope protein according to embodiment 20.
[0077] 25. A method for the production of a vaccine against the coronavirus SARS-CoV-2 comprising the successive steps of:
   [0078] a) introducing the vector according to one of embodiments 14 to 16 into an amplifying biotechnological production unit;
   [0079] b) amplifying the nucleotide acid according to one of embodiments 1 to 13 in the amplifying biotechnological production unit;
   [0080] c) obtaining the nucleotide acid amplified in step b);
   [0081] d) obtaining the vaccine against the coronavirus SARS-CoV-2 by using method according to embodiment 23 or 24.

[0082] The invention, therefore, relates to a fully synthetic, long-chain nucleic acid with at least 4,000 bases, characterised in that the nucleic acid comprises at least two of the four sequence parts A-D in any arrangement, wherein i) Sequence part A comprises a) a sequence as defined in SEQ. ID. 1 or a sequence having at least 98.5% sequence identity to the sequence as defined in SEQ. ID. 1; or b) a sequence as defined in SEQ. ID. 3 or a sequence having at least 90% sequence identity to the sequence as defined in SEQ. ID. 3; ii) Sequence part B comprises a) a sequence as defined in SEQ. ID. 5 or a sequence having at least 98.3% sequence identity to the sequence as defined in SEQ. ID. 5; or b) a sequence as defined in SEQ. ID. 7 or a sequence having at least 90% sequence identity to the sequence as defined in SEQ. ID. 7; iii) Sequence part C comprises a) a sequence as defined in SEQ. ID. 9 or a sequence having at least 97.2% sequence identity to the sequence as defined in SEQ. ID. 9; or b) a sequence as defined in SEQ. ID. 11 or a sequence having at least 90% sequence identity to the sequence as defined in SEQ. ID. 11; iv) Sequence part D comprises a sequence as defined in SEQ. ID. 13 or a sequence having at least 98.5% sequence identity to the sequence as defined in SEQ. ID. 13; or encompasses a ribonucleic acid sequence corresponding to the deoxyribonucleic acid sequence according to the sequence parts A-D.

[0083] In certain embodiments, the invention relates to a fully synthetic, long-chain nucleic acid with at least 4,000 bases, characterised in that the nucleic acid comprises a) at least two of the four sequence parts A-D in any arrangement, wherein i) Sequence part A comprises a sequence as defined in SEQ. ID. 50 or a sequence having at least 98.5% sequence identity to the sequence as defined in SEQ. ID. 50; ii) Sequence part B comprises a sequence as defined in SEQ. ID. 48 or a sequence having at least 98.3% sequence identity to the sequence as defined in SEQ. ID. 48;iii) Sequence part C comprises a sequence as defined in SEQ. ID. 49 or a sequence having at least 97.2% sequence identity to the sequence as defined in SEQ. ID. 49; iv) Sequence part D comprises a sequence as defined in SEQ. ID. 17 or a sequence having at least 98.5% sequence identity to the sequence as defined in SEQ. ID. 17; or encompasses a ribonucleic acid sequence corresponding to the deoxyribonucleic acid sequence according to the sequence parts A-D; and b) 1.) a nucleic acid sequence part encodes an amino acid sequence having the function of a SARS-CoV-2 amino acid sequence encoded by ORF7a; and/or 2.) a nucleic acid sequence part encodes an amino acid sequence having the function of a SARS-CoV-2 amino acid sequence encoded by ORF3a.

[0084] The nucleic acid according to the invention allows to significantly accelerate the production of the mentioned vaccines and leads to well-defined vaccines which are very specific to a virus or a modification, especially to the coronavirus SARS-CoV-2.

[0085] As will be shown further below, specific sequence features, of the sequence parts comprised in the nucleic acid sequence, according to the invention, allow the nucleic acid to be produced fully synthetically and thus tailor-made. The nucleic acid, according to the invention, thus differs from the nucleic acid naturally present in coronaviruses, not only in that it is in certain embodiments DNA instead of RNA, but also in the sequence which, in contrast to the naturally occurring sequence, allows the fully synthetic production of the nucleic acid by means of chemical synthesis.

[0086] Ultimately, the nucleic acid according to the invention thus makes it possible to express protein components that are defined with molecular precision. When these protein components are administered as a vaccine, optimal immunization can thus be obtained in the vaccine recipient. At the same time, the risk of possible side effects, which is highly prevalent with imprecisely defined protein components, is greatly minimized. Also, the fact that the protein components can be produced using common expression systems used for protein expression means that vaccines can be made available in large quantities very quickly. This is of crucial importance for viruses such as the coronavirus SARS-Cov-2, whose spread has assumed the proportions of a pandemic and whose containment, therefore, requires widespread vaccine administration.

[0087] The following terms and concepts shall be used in the context of this invention:

[0088] The term “nucleic acid”, refers to either DNA, RNA, and any modifications thereof. The nucleic acid may be single-stranded or double-stranded. Modifications include, but are not limited to, those which provide other chemical groups that incorporate additional charge, polarizability, hydrogen bonding, electrostatic interaction, and fluxionality to the nucleic acid ligand bases or the nucleic acid ligand as a whole. Such modifications include, but are not limited to, 2′-position sugar modifications, 5-position pyrimidine modifications, 8-position purine modifications, modifications at exocyclic amines, substitution of 4-thiouridine, substitution of 5-bromo or 5-iodo-uracil; backbone modifications, methylations, unusual base-pairing combinations such as the isobases isocytidine and isoguanidine. Modifications can also include 3′ and 5′ modifications such as capping.

[0089] Fully synthetic. From a chemical point of view, nucleic acids are very sophisticated molecules with repeating units, the so-called bases. The term “fully synthetic” in this context means that the nucleic acid according to the invention is produced by a series of chemical reaction steps using chemical reagents. Biochemical aids such as enzymes can also be used during individual late production steps, such as the joining of already longer oligomers. The latter can in turn optionally be synthetic. Fully synthetic nucleic acids have sequence features that enable the chemical production process and differ from naturally occurring nucleic acids in one or more of the following sequence features:
[0090] i) the absence of one or more enzymatic restriction sites, in particular, restriction sites for Type IIS restriction endonucleases, which are known to the person skilled in the art;
[0091] ii) the absence or reduced occurrence, compared to the corresponding naturally occurring nucleic acids, of repeating nucleic acid sequences with more than 9 consecutive units of the same base within the fully synthetic nucleic acid;
[0092] iii) the absence or reduced occurrence of repeating base-pair sequences with more than 12 bases compared to the corresponding naturally occurring nucleic acids;
[0093] iv) the absence or reduced occurrence, relative to the corresponding naturally occurring nucleic acids, of indirectly repeating base-pair segments consisting of more than 12 base units known to the person skilled in the art as reverse-complementary sequences therefor;
[0094] v) the absence or reduced occurrence, relative to the corresponding naturally occurring nucleic acids, of nucleic acid sequences with more than 9 consecutive repetitions of duplicate base units (dinucleotide repeats) known to the person skilled in the art; and
[0095] vi) the absence or reduced occurrence, relative to the corresponding naturally occurring nucleic acids, of nucleic acid sequences with more than five consecutive repetitions of triple base units (trinucleotide repeats) known to the person skilled in the art.

[0096] In some embodiments, fully synthetic nucleic acids are partly produced and/or comprise sequence features according to the methods described in Venetz, J. E., et al., 2019, Proceedings of the National Academy of Sciences, 116(16), 8070-8079 and/or the SI appendix thereof.

[0097] In some embodiments, fully synthetic nucleic acids comprise sequence features that enable the chemical production process and differ from naturally occurring nucleic acids in two or more of the above-mentioned sequence features, in particular of the above-mentioned sequence features i)-vi).

[0098] In some embodiments, fully synthetic nucleic acids comprise sequence features that enable the chemical production process and differ from naturally occurring nucleic acids in three or more of the above-mentioned sequence features, in particular of the above-mentioned sequence features i)-vi).

[0099] In some embodiments, fully synthetic nucleic acids comprise sequence features that enable the chemical production process and differ from naturally occurring nucleic acids in four or more of the above-mentioned sequence features, in particular of the above-mentioned sequence features i)-vi).

[0100] In some embodiments, fully synthetic nucleic acids comprise sequence features that enable the chemical production process and differ from naturally occurring nucleic acids in five or more of the above-mentioned sequence features, in particular of the above-mentioned sequence features i)-vi).

[0101] In some embodiments, fully synthetic nucleic acids comprise sequence features that enable the chemical production process and differ from naturally occurring nucleic acids in six of the above-mentioned sequence features, in particular of the above-mentioned sequence features i)-vi). Long-chain oligonucleotides have been commercially available for years in short fragments, typically producing pieces with 60, 100 or 200 bases. Massively longer oligonucleotides are not readily available because the syntheses used today have too high error rates to produce reasonable amounts of longer nucleic acids. Such fragments with less than 1000 bases are, therefore, called short-chain, while nucleic acids with 1000 bases or more are called long-chain. Long-chain nucleic acids with 1000 to 5000 bases can be produced today at considerable expense (e.g. by the companies Twist Bioscience, Life-technologies). Long-chain nucleic acids with more than 5000 bases are enormously complex but chemically well-defined molecules. Each of the molecules can be described completely in terms of classical organic chemistry by position, type and linkage with other parts of the molecule. Two identical long-chain nucleic acids are therefore, despite their size and despite the fact that they contain tens of thousands to millions of atoms, identical in that all components are identical and are identically linked.

[0102] An explanation of end groups, any residues of protective groups or other auxiliaries from the synthesis of nucleic acids. The above description refers to the type of base in the nucleic acid. The person skilled in the art is aware that the synthesis is carried out by means of various auxiliary agents which are cleaved off at the end. However, sometimes residues of such groups remain, or other parts of the molecule are derivatised before or after a synthesis step. Such groups are known to the person skilled in the art and include, among others, Poly-A tail, modified DNA bases, cleavable linkers from solid-phase synthesis, biochemical groups such as biotin or streptavidin and others.

[0103] Other possible modifications and modifications that are used in standard methods concern fluorescent markers. These modifications or residues thereof should not affect the above description, and a group of identical nucleic acids should be considered identical if all n bases at their positions per position and type base are identical for all bases. In other words, the nucleic acids of the invention also include nucleic acids with the above modifications or residues, provided they have the base sequences required by the invention.

[0104] According to a first aspect, the present invention thus concerns nucleic acids which have special properties. These special properties are comprised in the base sequence, i.e. the sequence, and are only obtained if the inventive nucleic acid has certain properties. These properties are directly parts of the specific molecule or the entire chemically comprehensive description of the specific molecule. However, for the sake of simplicity, the base sequence should be indicated within this description in the text, always making it clear that the specific molecule is meant. The base sequence is therefore only a pragmatic form of description and obviously better suited for a textual representation of the invention than a direct representation of the molecule, or its IUPAC name.

[0105] The inventive molecules acquire the special properties through the presence of specific sequences, analogous to a description of a group of classical chemical agents with one or more molecular parts, which in chemistry are typically abbreviated as “R” and can then be described in more detail by describing “R”. Thus, in the present invention, analogous to this usual procedure in organic chemistry, a group of sequences is described which are responsible for the special properties of the inventive long-chain fully synthetic nucleic acids.

[0106] The inventive nucleic acids are characterized by the fact that they comprise fully synthetic nucleic acids which code for at least two of the 4 types of proteins of envelope proteins coronaviruses.

[0107] The term “types of envelope proteins of coronaviruses”, as used herein, refers to group A, group B, group C, or group D proteins of a coronavirus. The term “group A” protein, as used herein, refers to the group of nucleocapsid protein (N-type) of coronavirus. The term “group B”, as used herein, refers to the group of envelope proteins (E-type) of coronaviruses. The term “group C” protein, as used herein, refers to the membrane protein (M-type) of coronavirus. The term “group D” protein, as used herein, refers to the glycosylated surface protein (S-type) of coronavirus.

[0108] In some embodiments, the nucleic acids described herein are characterized by the fact that they comprise nucleic acids which code for at least one group A protein and at least one group B protein. In some embodiments, the nucleic acids described herein are characterized by the fact that they comprise nucleic acids which code for at least one group A protein and at least one group C protein. In some embodiments, the nucleic acids described herein are characterized by the fact that they comprise nucleic acids which code for at least one group A protein and at least one group D protein. In some embodiments, the nucleic acids described herein are characterized by the fact that they comprise nucleic acids which code for at least one group B protein and at least one group C protein. In some embodiments, the nucleic acids described herein are characterized by the fact that they comprise nucleic acids which code for at least one group B protein and at least one group D protein. In some embodiments, the nucleic acids described herein are characterized by the fact that they comprise nucleic acids which code for at least one group C protein and at least one group D protein.

[0109] In some embodiments, the inventive nucleic acids are characterized by the fact that they
[0110] (a) comprise more than 4,000 bases in a well-defined sequence; and
[0111] (b) comprise at least 2 of 4 sequences of particular importance which are assigned to the 4 sequence groups A-D which code for the 4 types of envelope proteins of coronaviruses, wherein
   [0112] i) the first sequence group A encodes for envelope proteins of the nucleocapsid protein N of coronavirus,
   [0113] ii) the second sequence group B encodes for envelope proteins of the type envelope protein E of coronaviruses,
   [0114] iii) the third sequence group C encodes for envelope proteins of the membrane protein M type of coronavirus, and
   [0115] iv) the fourth sequence group D encodes for envelope proteins of the glycosylated surface protein S of coronavirus.

[0116] The sequence part A disclosed within this description comprises a sequence according to SEQ. ID. 1 or SEQ. ID. 3, coding for the corresponding protein sequences according to SEQ. ID. 2 or SEQ. ID. 4. In some embodiments, the sequence part A comprises the sequence defined by the SEQ. ID. 50 or sequence having at least 98.5%, at least 98.6%, at least 98.7%, at least 98.8%, at least 98.9%, at least 99%, at least 99.1%, at least 99.2%, at least 99.3%, at least 99.4%, at least 99.5%, at least 99.6%, at least 99.7%, at least 99.8%, or at least 99.9% sequence identity to SEQ. ID. 50.

[0117] In some embodiments, the sequence part A comprises a sequence having at least 90% sequence identity to SEQ. ID. 3.

[0118] In some embodiments, the sequence part A comprises a sequence coding for an amino acid sequence having at least 90%, having at least 91%, having at least 92%, having at least 93%, having at least 94%, having at least 95%, at least 96%, at least 97%, at least 98%, at least 99%, at least 99.1%, at least 99.2%, at least 99.3%, at least 99.4%, at least 99.5%, at least 99.6%, at least 99.7%, at least 99.8%, or at least 99.9% sequence identity to SEQ. ID. 2.

[0119] In some embodiments, the sequence part A comprises a sequence coding for an amino acid sequence having at least 90%, having at least 91%, having at least 92%, having at least 93%, having at least 94%, having at least 95%, at least 96%, at least 97%, at least 98%, at least 99%, at least 99.1%, at least 99.2%, at least 99.3%, at least 99.4%, at least 99.5%, at least 99.6%, at least 99.7%, at least 99.8%, or at least 99.9% sequence identity to SEQ. ID. 4.

[0120] In some embodiments, the sequence part A comprises a sequence coding for an amino acid sequence having at least 90%, having at least 91%, having at least 92%, having at least 93%, having at least 94%, having at least 95%, at least 96%, at least 97%, at least 98%, at least 99%, at least 99.1%, at least 99.2%, at least 99.3%, at least 99.4%, at least 99.5%, at least 99.6%, at least 99.7%, at least 99.8%, or at least 99.9% sequence identity to SEQ. ID. 2 and SEQ. ID. 4.

[0121] The sequence part B disclosed within this description comprises a sequence according to SEQ. ID. 5 or SEQ. ID. 7, coding for the corresponding protein sequences according to SEQ. ID. 6 or SEQ. ID. 8. In some embodiments, the sequence part B comprises the sequence defined by the SEQ. ID 48 or a sequence having at least 98.3%, at least 98.6%, at least 99.1%, or at least 99.5% sequence identity to SEQ. ID. 48.

[0122] In some embodiments, the sequence part B comprises a sequence having at least 90% sequence identity to SEQ. ID. 7.

[0123] In some embodiments, the sequence part B comprises a sequence coding for an amino acid sequence having at least 90%, having at least 91%, having at least 92%, having at least 93%, having at least 94%, having at least 95%, at least 96%, at least 97%, at least 98%, at least 99%, at least 99.1%, at least 99.2%, at least 99.3%, at least 99.4%, at least 99.5%, at least 99.6%, at least 99.7%, at least 99.8%, or at least 99.9% sequence identity to SEQ. ID. 6.

[0124] In some embodiments, the sequence part B comprises a sequence coding for an amino acid sequence having at least 90%, having at least 91%, having at least 92%, having at least 93%, having at least 94%, having at least 95%, at least 96%, at least 97%, at least 98%, at least 99%, at least 99.1%, at least 99.2%, at least 99.3%, at least 99.4%, at least 99.5%, at least 99.6%, at least 99.7%, at least 99.8%, or at least 99.9% sequence identity to SEQ. ID. 8.

[0125] In some embodiments, the sequence part B comprises a sequence coding for an amino acid sequence having at least 90%, having at least 91%, having at least 92%, having at least 93%, having at least 94%, having at least 95%, at least 96%, at least 97%, at least 98%, at least 99%, at least 99.1%, at least 99.2%, at least 99.3%, at least 99.4%, at least 99.5%, at least 99.6%, at least 99.7%, at least 99.8%, or at least 99.9% SEQ. ID. 6 and SEQ. ID. 8.

[0126] The sequence part C disclosed within this description comprises a sequence according to SEQ. ID. 9 or SEQ. ID. 11, coding for the corresponding protein sequences according to SEQ. ID. 10 or SEQ. ID. 12. In some embodiments, the sequence part C comprises the sequence defined by the SEQ. ID. 49 or a sequence having at least 97.2%, at least 97.4%, at least 97.6%, at least 97.8%, at least 98%, at least 98.2%, at least 98.4%, at least 98.6%, at least 98.8%, at least 99%, at least 99.2%, at least 99.4%, at least 99.6%, at least 99.8%, at sequence identity to SEQ. ID. 49.

[0127] In some embodiments, the sequence part C comprises a sequence having at least 90% sequence identity to SEQ. ID. 11.

[0128] In some embodiments, the sequence part B comprises a sequence coding for an amino acid sequence having at least 90%, having at least 91%, having at least 92%, having at least 93%, having at least 94%, having at least 95%, at least 96%, at least 97%, at least 98%, at least 99%, at least 99.1%, at least 99.2%, at least 99.3%, at least 99.4%, at least 99.5%, at least 99.6%, at least 99.7%, at least 99.8%, or at least 99.9% sequence identity to sequence identity to SEQ. ID. 12.

[0129] In some embodiments, the sequence part B comprises a sequence coding for an amino acid sequence having at least 90%, having at least 91%, having at least 92%, having at least 93%, having at least 94%, having at least 95%, at least 96%, at least 97%, at least 98%, at least 99%, at least 99.1%, at least 99.2%, at least 99.3%, at least 99.4%, at least 99.5%, at least 99.6%, at least 99.7%, at least 99.8%, or at least 99.9% sequence identity to SEQ. ID. 10.

[0130] In some embodiments, the sequence part B comprises a sequence coding for an amino acid sequence having at least 90%, having at least 91%, having at least 92%, having at least 93%, having at least 94%, having at least 95%, at least 96%, at least 97%, at least 98%, at least 99%, at least 99.1%, at least 99.2%, at least 99.3%, at least 99.4%, at least 99.5%, at least 99.6%, at least 99.7%, at least 99.8%, or at least 99.9% sequence identity to SEQ. ID. 10 and SEQ. ID. 12.

[0131] The sequence part D disclosed within this description comprises a sequence according to SEQ. ID. 13, coding for the corresponding protein sequence according to SEQ. ID. 14. In some embodiments, the sequence part D comprises the sequence defined by the SEQ. ID 17 or a sequence having at least 98.5%, at least 98.6%, at least 98.7%, at least 98.8%, at least 98.9%, at least 99%, at least 99.1%, at least 99.2%, at least 99.3%, at least 99.4%, at least 99.5%, at least 99.6%, at least 99.7%, at least 99.8%, or at least 99.9% sequence identity to SEQ. ID. 17.

[0132] In some embodiments, the sequence part B comprises a sequence coding for an amino acid sequence having at least 90%, having at least 91%, having at least 92%, having at least 93%, having at least 94%, having at least 95%, at least 96%, at least 97%, at least 98%, at least 99%, at least 99.1%, at least 99.2%, at least 99.3%, at least 99.4%, at least 99.5%, at least 99.6%, at least 99.7%, at least 99.8%, or at least 99.9% sequence identity to SEQ. ID. 14.

[0133] The term “percent (%) sequence identity” with respect to a reference sequence is defined as the percentage of nucleotides or amino acid residues in a candidate sequence that are identical with the nucleotides or amino acid residues in the reference sequence, after aligning the sequences and introducing gaps, if necessary, to achieve the maximum percent sequence identity, and not considering any conservative substitutions as part of the sequence identity. Alignment for purposes of determining percent amino acid sequence identity can be achieved in various ways that are within the skill in the art, for instance, using publicly available computer software such as BLAST, BLAST-2, ALIGN or Megalign (DNASTAR) software. Those skilled in the art can determine appropriate parameters for aligning sequences, including any algorithms needed to achieve maximal alignment over the full length of the sequences being compared.

[0134] In some embodiments, the nucleotide acid sequence of the invention is altered (e.g., to facilitate the production process of the nucleotide acid sequence or products thereof) without altering or by unsubstantially altering the properties of the protein products.

[0135] In some embodiments, the alterations of the nucleotide acid sequence of the invention include at least one alteration selected from the group of
[0136] 1) base substitutions insertions, or deletions relative to the reference sequence without altering or by unsubstantially altering the properties of the protein products;
[0137] 2) replacing codons with synonymous versions; and
[0138] 3) reduction of the number of hypothetical genetic elements present within protein-coding sequences such as (alternative) ORFs, predicted gene internal transcriptional start sites, and/or sequence motifs (predicted or cryptic) that fine-tune translation rates (e.g., ribosome stalling motifs).

[0139] Testing whether the genes of the altered nucleotide acid sequence of the invention remain functional will identify genes in which additional information beyond the amino acid code is necessary for proper functioning.

[0140] In some embodiments, the nucleotide acid sequence described herein is altered to improve the biological function of the encoded protein products.

[0141] Such a biological function includes but is not limited to stability enhancement, production facilitation (e.g., insertion of additional replication initiating sequences), replication limitation.

[0142] In some embodiments, the nucleotide acid sequence described herein is altered to encode at least one alternative protein of interest with a similar structure but alternative biological function, such as the function of a protein of a mutated virus.

[0143] The person skilled in the art can obtain such an altered nucleotide sequence by analyzing the sequence coding for at least one alternative protein of interest (e.g. the nucleotide acid sequence of a mutated virus) and implementing the relevant alterations (e.g. mutations) into the most similar nucleotide acid sequence described herein. In some embodiments, the nucleotide acid sequences the most similar nucleotide acid sequence described herein is a sequence defined by the SEQ. ID. 1, SEQ. ID. 3, SEQ. ID. 5, SEQ. ID. 7, SEQ. ID. 9, SEQ. ID. 11, SEQ. ID. 13, and/or SEQ. ID. 17.

[0144] In some embodiments, the nucleotide acid sequences the most similar nucleotide acid sequence described herein is a sequence defined by the SEQ. ID. 1, SEQ. ID. 5, SEQ. ID. 9, SEQ. ID. 13.

[0145] In some embodiments, the coronavirus described herein is SARS-CoV-2. In some embodiment the SARS-CoV-2 described herein is a SARS-CoV-2 variant selected from the group of Lineage B.1.1.207, Lineage B.1.1.7, Cluster 5, 501.V2 variant, Lineage P.1, Lineage B.1.429/CAL.20C, and Lineage B.1.525.

[0146] In some embodiments, the SARS-CoV-2 described herein is a SARS-CoV-2 variant described by a Nextstrain Glade selected from the group 19A, 20A, 20C, 20G, 20H, 20B, 20D, 20F, 20I, and 20E.

[0147] In some embodiments, the sequence coding for at least one alternative protein of interest comprises sequences coding for a protein that is characteristic for at least one SARS-CoV-2 variant. In some embodiments, the protein that is characteristic for at least one SARS-CoV-2 variant is a protein that is encoded by a sequence having at least 90%, having at least 91%, having at least 92%, having at least 93%, having at least 94%, having at least 95%, at least 96%, at least 97%, at least 98%, at least 99%, at least 99.1%, at least 99.2%, at least 99.3%, at least 99.4%, at least 99.5%, at least 99.6%, at least 99.7%, at least 99.8%, or at least 99.9% sequence identity to the sequences SEQ. ID. 18, SEQ. ID. 21, SEQ. ID. 22 and/or SEQ. ID. 26.

[0148] This implementation of the relevant alterations can be achieved for example by insertion, deletion, substitution, and/or modification of at least one base, but not more than the percentage of the nucleotide acid sequence described herein.

[0149] In some embodiments, the nucleotide acid sequences the most similar nucleotide acid sequence described herein is a sequence defined by the SEQ. ID. 1, SEQ. ID. 3, SEQ. ID. 5, SEQ. ID. 7, SEQ. ID. 9, SEQ. ID. 11, SEQ. ID. 13, and/or SEQ. ID. 17.

[0150] In some embodiments, the nucleotide acid sequences the most similar nucleotide acid sequence described herein is at least one sequence defined by the SEQ. ID. 1, SEQ. ID. 5, SEQ. ID. 9, and/or SEQ. ID. 13.

[0151] In some embodiments, the insertion, deletion, or modification can be achieved by de novo synthesis of the nucleic acid of the invention using a series of chemical reaction steps using chemical reagents as described herein.

[0152] Altered sequences may comprise sequence features (e.g., the sequence features i)-vi) described above) that enable and/or improve the chemical production process of the altered sequences at more or different positions than the nucleotide acid sequences defined by the SEQ. ID. 1, SEQ. ID. 3, SEQ. ID. 5, SEQ. ID. 7, SEQ. ID. 9, SEQ. ID. 11, SEQ. ID. 13, and/or SEQ. ID. 17.

[0153] Their possible transformation into an IUPAC-classifiable molecule is known to the person skilled in the art. As an alternative to the deoxyribonucleic acid as defined above, a corresponding ribonucleic acid may also be present. In other words, in addition to the deoxyribonucleic acid sequence according to the sequence parts A-D, the definition according to the invention also includes a corresponding ribonucleic acid sequence. In these, the corresponding ribonucleic acid has sequence parts as defined above in which thymine (T) is replaced by uracil (U).

[0154] The base-pair sequence of the inventive long-chain nucleic acids, coding for the envelope proteins E, M, N and S of MHV and SARS-CoV-2 and, if applicable, the RNA-dependent RNA polymerase of MHV, represents the result of a complex development, in which, in a first step, a large number of sequence variants were formed by calculation starting from the natural amino acid sequence of the corresponding proteins, considering the redundancy of the genetic code.

[0155] Particularly, the base-pair sequence of the inventive long-chain nucleic acids, coding for the proteins E, M, N and/or S of SARS-CoV-2 represents the result of a complex development, in which, in a first step, a large number of sequence variants were formed by calculation starting from the natural amino acid sequence of the corresponding proteins, considering the redundancy of the genetic code.

[0156] From the resulting sequence tree, in a second step, the base-pair sequence for each of the encoded envelope proteins was determined which, firstly, is most similar to the natural sequence in terms of biological functionality and, secondly, also has the optimal sequence characteristics to enable the chemical production process.

[0157] Further, the sequences encode a combination of structural proteins of the wild-type virus. This enables a broad range of epitopes available to the immune system including T-cell epitopes (see, e.g., Grifoni, A., et al., 2020, Cell, 181(7), 1489-1501). This broad range of epitopes may enable immunity against a broad range of virus variants in patients with or without pre-existing immunity.

[0158] Accordingly, the invention is at least in part based on the discovery that the nucleic acid of the invention, enables efficient production of a combination virus-like proteins with limited replication capabilities but similar antigenic effect to the original virus.

[0159] As mentioned, the nucleic acid according to the invention has at least 4′000 bases or base-pairs. Preferably, it has at least 8′000 bases, particularly preferably at least 20′000 bases, in a defined sequence. Further, it is preferred that the nucleic acid has a maximum size of 1′000′000 bases, preferably a maximum size of 200′000 bases.

[0160] Large sequences have repeatedly shown to be difficult to produce, amplify and/or express, but the large number of bases is beneficial to consistently produce a certain combination of viral-like proteins that have a similar antigenic effect to the original virus.

[0161] The means and methods provided herein, enable the production of the nucleic acid according to the invention in a certain length range (see, e.g., Example 1-3).

[0162] Accordingly, the invention is at least in part based on the discovery that the nucleic acid of the invention with a length in a certain length range, enables efficient production of a combination virus-like proteins with limited replication capabilities but similar antigenic effect to the original virus.

[0163] The nucleic acid according to the invention can be present in the form of a single long-chain nucleic acid or divided into separate long-chain nucleic acids.

[0164] In some embodiments, the nucleic acid according to the invention can be present in the form of a single long-chain nucleic acid or divided into up to 4 separate long-chain nucleic acids.

[0165] The separation into separate long-chain nucleic acids may facilitate amplification of the nucleic acids of the invention (Example 3).

[0166] According to a further preferred embodiment, the sequence parts A-D are arranged according to the sequence SEQ. ID. 16.

[0167] It is also preferred that sequence part D consists of SEQ. ID. 17, and codes for the protein sequence according to SEQ. ID. 18.

[0168] According to a further preferred embodiment, the sequence parts A-C are arranged according to the sequence SEQ. ID. 19 whereby the sequence part A codes for the protein sequence according to SEQ. ID. 26, the sequence part B codes for the protein sequence according to SEQ. ID. 21, the sequence part C encodes the protein sequence according to SEQ. ID. 22, and in addition the sequence parts A-C can be extended with sequences coding for SEQ. ID. 20, SEQ. ID. 22, SEQ. ID. 23, SEQ. ID. 24, SEQ. ID. 25 and SEQ. ID. 27.

[0169] In some embodiments, the invention relates to the nucleotide acid sequence according the invention, wherein the nucleotide acid sequence is defined by a sequence having at least 98.5%, at least 98.6%, at least 98.7%, at least 98.8%, at least 98.9%, at least 99%, at least 99.1%, at least 99.2%, at least 99.3%, at least 99.4%, at least 99.5%, at least 99.6%, at least 99.7%, at least 99.8%, or at least 99.9% sequence identity to the SEQ. ID. 19 or the corresponding ribonucleic acid sequence.

[0170] It is particularly preferred to supplement the sequence parts A-D disclosed within this description with a nucleic acid sequence of sequence part E, which comprises a sequence according to SEQ. ID. 15 or SEQ. ID. 30, coding for the polyprotein sequences according to SEQ. ID. 31 and SEQ. ID. 32 of the RNA-dependent RNA polymerase of coronavirus.

[0171] The sequence according to SEQ. ID. 15 or SEQ. ID. 30 may represent a component of the nucleic acid according to the invention and thus be present in the same molecule in combination with two or more sequences of sequence parts A-D. It is also conceivable that it is present in a kit together with the nucleic acid according to the invention as a component of an independent molecule. The possible transfer into an IUPAC-classifiable molecule is known to the person skilled in the art.

[0172] The presence of sequence part E is relevant if, for gene expression of the corresponding proteins, RNA is introduced into a biotechnological production unit instead of a DNA plasmid. In this respect, it is also conceivable that sequence part E is introduced into a kit in the form of RNA according to SEQ. ID. 33 or SEQ. ID. 34 is present in a kit. This will be explained further in the context of the specific examples below.

[0173] It has been shown that these concrete sequences are particularly advantageous firstly with regard to their similarity to the natural sequence or their biological functionality and secondly with regard to the chemical production process.

[0174] According to another preferred embodiment, the nucleic acid comprises at least three of the four sequence parts A-D in any arrangement. In this respect, it is particularly preferred that the nucleic acid comprises the four sequence parts A-D in any arrangement.

[0175] In certain embodiments, the invention relates to the nucleic acid according to the invention, characterized in that the nucleic acid comprises two or three of the four sequence parts A-D.

[0176] In certain embodiments, the invention relates to the nucleic acid according to the invention, characterized in that the nucleic acid comprises three of the four sequence parts A-D.

[0177] Therefore, in some embodiments, the sequences encode a combination of two or three structural proteins of the wild-type virus or proteins with equivalent functions thereof. This enables a broad range of epitopes available to the immune system including T-cell epitopes (see, e.g., Grifoni, A., et al., 2020, Cell, 181(7), 1489-1501). This broad range of epitopes may enable immunity against a broad range of virus variants in patients with or without pre-existing immunity.

[0178] Accordingly, the invention is at least in part based on the discovery that the nucleic acid of the invention, enables efficient production of a combination virus-like proteins with limited replication capabilities but similar antigenic effect to the original virus.

[0179] Further, it is preferred that the nucleic acid additionally comprises at least one sequence consisting of the group of
[0180] SEQ. ID. 15
[0181] SEQ. ID. 28
[0182] SEQ. ID. 29 and
[0183] SEQ. ID. 30.

[0184] In some embodiments, the nucleic acid of the invention comprises one of the deoxyribonucleic acid sequences according to the sequence parts SEQ. ID. 15, SEQ. ID. 28, SEQ. ID. 29 and SEQ. ID. 30 or the corresponding ribonucleic acid sequence.

[0185] In some embodiments, the invention relates to the nucleic acid according to the invention, characterized in that the nucleic acid comprises SEQ. ID. 28, or the corresponding ribonucleic acid sequence.

[0186] In some embodiments, the invention relates to the nucleic acid according to the invention, characterized in that the nucleic acid comprises SEQ. ID. 29, or the corresponding ribonucleic acid sequence.

[0187] In some embodiments, the invention relates to the nucleic acid according to the invention, characterized in that the nucleic acid comprises SEQ. ID. 28 and SEQ. ID. 29, or the corresponding ribonucleic acid sequence.

[0188] The nucleic acids of the invention have the special property that they can be incorporated by standard methods into a cell line or other production organism and stimulate the production of fragments or whole envelopes of a virus. The standard methods required for this purpose are known to the person skilled in the art and are described in the context of the concrete examples.

[0189] In certain embodiments, the invention relates to the nucleic acid of the invention, characterized in that the nucleic acid comprises not more than one or no ORF-associated nucleic acid sequence parts, wherein each ORF-associated nucleic acid sequence part encodes an amino acid sequence having the function of a SARS-CoV-2 amino acid sequence encoded by ORF6, or ORF8.

[0190] In some embodiments, the invention relates to the nucleic acid of the invention, characterized in that the nucleic acid comprises one ORF-associated nucleic acid sequence part, wherein each ORF-associated nucleic acid sequence part encodes an amino acid sequence having the function of a SARS-CoV-2 amino acid sequence encoded by ORF6 or ORF8.

[0191] The inventors found, that virus particles can be amplified and subsequently translated and successfully assembled despite omission of certain ORFs that were considered useful for the effective replicability of the original virus. The resulting virus particle may still be able to infect cells and induce the production of non-infective virus fragments.

[0192] The inventors found that the ORF6 and ORF8 of the SARS-CoV-2 virusgenome (see FIG. 5) can be omitted, dysfunctional or deleted and virus assembly remains possible.

[0193] In certain embodiments, the invention relates to the nucleic acid of the invention, wherein one ORF-associated nucleic acid sequence part encodes an amino acid sequence having the function of a SARS-CoV-2 amino acid sequence encoded by ORF3a.

[0194] The phrase “sequence having the function of a SARS-CoV-2 amino acid sequence”, as used herein, refers to a sequence having the function of a SARS-CoV-2 amino acid sequence encoded by the sequence as defined by the SEQ. ID. 60. The structure and function of SARS-CoV-2 amino acid sequences are known in the art (see e.g., Yadav, Rohitash et al., 2021, Cells vol. 10,4 821; Arya, Rimanshee, et al., 2021, Journal of molecular biology 433.2: 166725; Gorkhali, R., et al., 2021, Bioinformatics and Biology Insights, 15, 11779322211025876; Redondo N, et al., 2021, Front Immunol. Jul 7; 12:708264). In some embodiments, the sequence having the function of a SARS-CoV-2 amino acid sequence described herein is a sequence comprised in SEQ. ID. 60 or a sequence having at least 90%, having at least 91%, having at least 92%, having at least 93%, having at least 94%, having at least 95%, at least 96%, at least 97%, at least 98%, at least 99%, at least 99.1%, at least 99.2%, at least 99.3%, at least 99.4%, at least 99.5%, at least 99.6%, at least 99.7%, at least 99.8%, or at least 99.9% sequence identity to the sequence comprised in SEQ. ID. 60. Such % sequence variation can for example derive from one or more mutations of a SARS-CoV-2 variant in the SEQ. ID. 60 or from insertions, deletions and/or replacements, preferably conservative insertions, deletions and/or replacements that alter the sequence without altering or without substantially altering the function of the encoded amino acid sequence.

[0195] The function of a SARS-CoV-2 amino acid sequence encoded by ORF3a as well as ORF3a sequences and mutations thereof are known in the art (see e.g. Bianchi M, et al., 2021, Int J Biol Macromol. 2021; 170:820-826.) The most common mutations in the ORF3a sequence are V13L, Q57H, Q57H+A99V, G196V and G252V. In some embodiments, the ORF-associated nucleic acid sequence part encoding an amino acid sequence having the function of ORF3a is a sequence encoding SEQ. ID. 20 or a sequence encoding SEQ. ID. 20 having at least 90%, having at least 91%, having at least 92%, having at least 93%, having at least 94%, having at least 95%, at least 96%, at least 97%, at least 98%, at least 99%, at least 99.1%, at least 99.2%, at least 99.3%, at least 99.4%, at least 99.5%, at least 99.6%, at least 99.7%, at least 99.8%, or at least 99.9% sequence identity to the sequence encoding SEQ. ID. 20. In some embodiments, the ORF-associated nucleic acid sequence part encoding an amino acid sequence having the function of ORF3a is a sequence as defined by SEQ. ID. 52 having at least 90%, having at least 91%, having at least 92%, having at least 93%, having at least 94%, having at least 95%, at least 96%, at least 97%, at least 98%, at least 99%, at least 99.1%, at least 99.2%, at least 99.3%, at least 99.4%, at least 99.5%, at least 99.6%, at least 99.7%, at least 99.8%, or at least 99.9% sequence identity to SEQ. ID. 52. Such % sequence variation can for example derive from one or more mutations described in Bianchi M, et al., 2021, Int J Biol Macromol. 2021; 170:820-826 or from insertions, deletions and/or replacements, preferably conservative insertions, deletions and/or replacements that alter the sequence without altering or without substantially altering the function of the encoded amino acid sequence.

[0196] The function of a SARS-CoV-2 amino acid sequence encoded by ORF6 as well as ORF6 sequences and mutations thereof are known in the art (see e.g. Hassan, Sk Sarif, Pabitra Pal Choudhury, and Bidyut Roy, 2021, Meta Gene 28: 100873.) In some embodiments, the ORF-associated nucleic acid sequence part encoding an amino acid sequence having the function of ORF6 is a sequence encoding SEQ. ID. 23 or a sequence having at least 90%, having at least 91%, having at least 92%, having at least 93%, having at least 94%, having at least 95%, at least 96%, at least 97%, at least 98%, at least 99%, at least 99.1%, at least 99.2%, at least 99.3%, at least 99.4%, at least 99.5%, at least 99.6%, at least 99.7%, at least 99.8%, or at least 99.9% sequence identity to the sequence encoding SEQ. ID. 23. In some embodiments, the ORF-associated nucleic acid sequence part encoding an amino acid sequence having the function of ORF6 is a sequence as defined by SEQ. ID. 53 having at least 90%, having at least 91%, having at least 92%, having at least 93%, having at least 94%, having at least 95%, at least 96%, at least 97%, at least 98%, at least 99%, at least 99.1%, at least 99.2%, at least 99.3%, at least 99.4%, at least 99.5%, at least 99.6%, at least 99.7%, at least 99.8%, or at least 99.9% sequence identity to SEQ. ID. 53. Such % sequence variation can for example derive from one or more mutations described in Hassan, Sk Sarif, Pabitra Pal Choudhury, and Bidyut Roy, 2021, Meta Gene 28: 100873 or from insertions, deletions and/or replacements, preferably conservative insertions, deletions and/or replacements that alter the sequence without altering or without substantially altering the function of the encoded amino acid sequence.

[0197] The function of a SARS-CoV-2 amino acid sequence encoded by ORF7a as well as ORF7a sequences and mutations thereof are known in the art (see e.g. Yashvardhini, Niti, et al., 2021, Biomedical Research and Therapy 8.8: 4497-4504.) In some embodiments, the ORF-associated nucleic acid sequence part encoding an amino acid sequence having the function of ORF7a is a sequence encoding SEQ. ID. 24 or a sequence having at least 90%, having at least 91%, having at least 92%, having at least 93%, having at least 94%, having at least 95%, at least 96%, at least 97%, at least 98%, at least 99%, at least 99.1%, at least 99.2%, at least 99.3%, at least 99.4%, at least 99.5%, at least 99.6%, at least 99.7%, at least 99.8%, or at least 99.9% sequence identity to the sequence encoding SEQ. ID. 24. In some embodiments, the ORF-associated nucleic acid sequence part encoding an amino acid sequence having the function of ORF7a is a sequence as defined by SEQ. ID. 54 having at least 90%, having at least 91%, having at least 92%, having at least 93%, having at least 94%, having at least 95%, at least 96%, at least 97%, at least 98%, at least 99%, at least 99.1%, at least 99.2%, at least 99.3%, at least 99.4%, at least 99.5%, at least 99.6%, at least 99.7%, at least 99.8%, or at least 99.9% sequence identity to SEQ. ID. 54. Such % sequence variation can for example derive from one or more mutations described in Yashvardhini, Niti, et al., 2021, Biomedical Research and Therapy 8.8: 4497-4504 or from insertions, deletions and/or replacements, preferably conservative insertions, deletions and/or replacements that alter the sequence without altering or without substantially altering the function of the encoded amino acid sequence. The function of a SARS-CoV-2 amino acid sequence encoded by ORF8 as well as ORF8 sequences and mutations thereof are known in the art (see e.g. Badua, Christian Luke DC, Karol Ann T. Baldo, and Paul Mark B. Medina., 2021, Journal of medical virology 93.3: 1702-1721; Hassan, Sk Sarif, et al., 2021, Computers in biology and medicine 133: 104380.) In some embodiments, the ORF-associated nucleic acid sequence part encoding an amino acid sequence having the function of ORF8 is a sequence encoding SEQ. ID. 25 or a sequence having at least 90%, having at least 91%, having at least 92%, having at least 93%, having at least 94%, having at least 95%, at least 96%, at least 97%, at least 98%, at least 99%, at least 99.1%, at least 99.2%, at least 99.3%, at least 99.4%, at least 99.5%, at least 99.6%, at least 99.7%, at least 99.8%, or at least 99.9% sequence identity to the sequence encoding SEQ. ID. 25. In some embodiments, the ORF-associated nucleic acid sequence part encoding an amino acid sequence having the function of ORF8 is a sequence as defined by SEQ. ID. 55 having at least 90%, having at least 91%, having at least 92%, having at least 93%, having at least 94%, having at least 95%, at least 96%, at least 97%, at least 98%, at least 99%, at least 99.1%, at least 99.2%, at least 99.3%, at least 99.4%, at least 99.5%, at least 99.6%, at least 99.7%, at least 99.8%, or at least 99.9% sequence identity to SEQ. ID. 55. Such % sequence variation can for example derive from one or more mutations described in Badua, Christian Luke DC, Karol Ann T. Baldo, and Paul Mark B. Medina., 2021, Journal of medical virology 93.3: 1702-1721 or from insertions, deletions and/or replacements, preferably conservative insertions, deletions and/or replacements that alter the sequence without altering or without substantially altering the function of the encoded amino acid sequence.

[0198] The inventors found that the sequences equivalent to the ORF6, ORF7a and ORF8 of the SARS-CoV-2 virusgenome can be omitted, dysfunctional or deleted and virus assembly remains possible.

[0199] In some embodiments, the invention relates to the nucleic acid according to the invention, wherein the nucleic acid additionally comprises
[0200] a) 1.) an ORF1ab sequence defined by the SEQ. ID. 51 or a sequence having at least 98,5%, at least 98.6%, at least 98.7%, at least 98.8%, at least 98.9%, at least 99%, at least 99.1%, at least 99.2%, at least 99.3%, at least 99.4%, at least 99.5%, at least 99.6%, at least 99.7%, at least 99.8%, or at least 99.9% sequence identity to SEQ. ID. 51; or
[0201] 2.) i) an ORF1b sequence defined by the SEQ. ID. 59 or a sequence having at least 98,5%, at least 98.6%, at least 98.7%, at least 98.8%, at least 98.9%, at least 99%, at least 99.1%, at least 99.2%, at least 99.3%, at least 99.4%, at least 99.5%, at least 99.6%, at least 99.7%, at least 99.8%, or at least 99.9% sequence identity to SEQ. ID. 59; and
[0202] ii) an ORF1a sequence defined by the SEQ. ID. 58 or a sequence having at least 98,6%, at least 98.7%, at least 98.8%, at least 98.9%, at least 99%, at least 99.1%, at least 99.2%, at least 99.3%, at least 99.4%, at least 99.5%, at least 99.6%, at least 99.7%, at least 99.8%, or at least 99.9% sequence identity to SEQ. ID. 58;
[0203] b) an ORF3a sequence defined by the SEQ. ID. 52 or a sequence having at least 99%, at least 99.1%, at least 99.3%, at least 99.4%, at least 99.5%, at least 99.7%, at least 99.8%, or at least 99.9% sequence identity to SEQ. ID 52; and
[0204] c) an ORF7a sequence defined by the SEQ. ID. 54 or a sequence having at least 99,5% sequence identity to SEQ. ID. 54.

[0205] In some embodiments, the invention relates to the nucleic acid according to the invention, wherein the nucleic acid additionally comprises
[0206] a) 1.) an ORF1ab sequence defined by the SEQ. ID. 51 or a sequence having at least 98,5%, at least 98.6%, at least 98.7%, at least 98.8%, at least 98.9%, at least 99%, at least 99.1%, at least 99.2%, at least 99.3%, at least 99.4%, at least 99.5%, at least 99.6%, at least 99.7%, at least 99.8%, or at least 99.9% sequence identity to SEQ. ID. 51; or
[0207] 2.) i) an ORF1b sequence defined by the SEQ. ID. 59 or a sequence having at least 98,5%, at least 98.6%, at least 98.7%, at least 98.8%, at least 98.9%, at least 99%, at least 99.1%, at least 99.2%, at least 99.3%, at least 99.4%, at least 99.5%, at least 99.6%, at least 99.7%, at least 99.8%, or at least 99.9% sequence identity to SEQ. ID. 59; and
[0208] ii) a n ORF1a sequence defined by the SEQ. ID. 58 or a sequence having at least 98,6%, at least 98.7%, at least 98.8%, at least 98.9%, at least 99%, at least 99.1%, at least 99.2%, at least 99.3%, at least 99.4%, at least 99.5%, at least 99.6%, at least 99.7%, at least 99.8%, or at least 99.9% sequence identity to SEQ. ID. 58;
[0209] b) an ORF3a sequence defined by the SEQ. ID. 52 or a sequence having at least 99%, at least 99.1%, at least 99.3%, at least 99.4%, at least 99.5%, at least 99.7%, at least 99.8%, or at least 99.9% sequence identity to SEQ. ID 52;
[0210] c) an ORF7a sequence defined by the SEQ. ID. 54 or a sequence having at least 99,5% sequence identity to SEQ. ID. 54; and
[0211] d) an ORF8 sequence defined by the SEQ. ID. 55 or a sequence having at least 99%, having at least 99.3%, or having at least 99.6% sequence identity to SEQ. ID 55.

[0212] In some embodiments, the invention relates to the nucleic acid according to the invention, wherein the nucleic acid additionally comprises
[0213] a) 1.) an ORF1ab sequence defined by the SEQ. ID. 51 or a sequence having at least 98,5%, at least 98.6%, at least 98.7%, at least 98.8%, at least 98.9%, at least 99%, at least 99.1%, at least 99.2%, at least 99.3%, at least 99.4%, at least 99.5%, at least 99.6%, at least 99.7%, at least 99.8%, or at least 99.9% sequence identity to SEQ. ID. 51; or
[0214] 2.) i) an ORF1b sequence defined by the SEQ. ID. 59 or a sequence having at least 98,5%, at least 98.6%, at least 98.7%, at least 98.8%, at least 98.9%, at least 99%, at least 99.1%, at least 99.2%, at least 99.3%, at least 99.4%, at least 99.5%, at least 99.6%, at least 99.7%, at least 99.8%, or at least 99.9% sequence identity to SEQ. ID. 59; and
[0215] ii) a n ORF1a sequence defined by the SEQ. ID. 58 or a sequence having at least 98,6%, at least 98.7%, at least 98.8%, at least 98.9%, at least 99%, at least 99.1%, at least 99.2%, at least 99.3%, at least 99.4%, at least 99.5%, at least 99.6%, at least 99.7%, at least 99.8%, or at least 99.9% sequence identity to SEQ. ID. 58;
[0216] b) an ORF3a sequence defined by the SEQ. ID. 52 or a sequence having at least 99%, at least 99.1%, at least 99.3%, at least 99.4%, at least 99.5%, at least 99.7%, at least 99.8%, or at least 99.9% sequence identity to SEQ. ID 52;
[0217] c) an ORF7a sequence defined by the SEQ. ID. 54 or a sequence having at least 99,5% sequence identity to SEQ. ID. 54; and
[0218] d) an ORF6 sequence defined by the SEQ. ID. 53 or a sequence having at least 94,1% at least 94.7%, at least 95.2%, at least 95.8%, at least 96.3%, at least 96.8%, at least 97.4%, at least 97.9%, or at least 98.5%, at least 99%, or at least 99.6%, sequence identity to SEQ. ID 53.

[0219] In some embodiments, the invention relates to the nucleic acid according to the invention, wherein the nucleic acid additionally comprises
[0220] a) 1.) an ORF1ab sequence defined by the SEQ. ID. 51 or a sequence having at least 98,5%, at least 98.6%, at least 98.7%, at least 98.8%, at least 98.9%, at least 99%, at least 99.1%, at least 99.2%, at least 99.3%, at least 99.4%, at least 99.5%, at least 99.6%, at least 99.7%, at least 99.8%, or at least 99.9% sequence identity to SEQ. ID. 51; or
[0221] 2.) i) an ORF1b sequence defined by the SEQ. ID. 59 or a sequence having at least 98,5%, at least 98.6%, at least 98.7%, at least 98.8%, at least 98.9%, at least 99%, at least 99.1%, at least 99.2%, at least 99.3%, at least 99.4%, at least 99.5%, at least 99.6%, at least 99.7%, at least 99.8%, or at least 99.9% sequence identity to SEQ. ID. 59; and
[0222] ii) a n ORF1a sequence defined by the SEQ. ID. 58 or a sequence having at least 98,6%, at least 98.7%, at least 98.8%, at least 98.9%, at least 99%, at least 99.1%, at least 99.2%, at least 99.3%, at least 99.4%, at least 99.5%, at least 99.6%, at least 99.7%, at least 99.8%, or at least 99.9% sequence identity to SEQ. ID. 58;
[0223] b) an ORF3a sequence defined by the SEQ. ID. 52 or a sequence having at least 99%, at least 99.1%, at least 99.3%, at least 99.4%, at least 99.5%, at least 99.7%, at least 99.8%, or at least 99.9% sequence identity to SEQ. ID 52;
[0224] c) an ORF7a sequence defined by the SEQ. ID. 54 or a sequence having at least 99,5% sequence identity to SEQ. ID. 54;
[0225] d) an ORF6 sequence defined by the SEQ. ID. 53 or a sequence having at least 94,1% at least 94.7%, at least 95.2%, at least 95.8%, at least 96.3%, at least 96.8%, at least 97.4%, at least 97.9%, at least 98.5%, at least 99%, or at least 99.6%, sequence identity to SEQ. ID 53; and
[0226] e) an ORF8 sequence defined by the SEQ. ID. 55 or a sequence having at least 99%, having at least 99.3%, or having at least 99.6% sequence identity to SEQ. ID 55.

[0227] In some embodiments, the invention relates to the nucleic acid according to the invention, wherein the nucleic acid additionally comprises a 3′UTR, a 5′UTR, a TRS-L, a TRS-B: S, a TRS-B: orf3a, a TRS-B: E, a TRS-B: M, a TRS-B: orf6, a TRS-B: orf7a, a TRS-B: orf8 and/or a TRS-B: N.

[0228] In some embodiments, the invention relates to the nucleic acid according to the invention, wherein the nucleic acid additionally comprises a 3′UTR defined by the SEQ. ID. 57 and/or a 5′UTR defined by the SEQ. ID. 56.

[0229] In some embodiments, the invention relates to the nucleic acid according to the invention, wherein the nucleic acid additionally comprises a TRS-L, a TRS-B: S, a TRS-B: orf3a, a TRS-B: E, a TRS-B: M, a TRS-B: orf6, a TRS-B: orf7a, a TRS-B: orf8 and/or a TRS-B: N are/is defined by the sequence ACGAAC.

[0230] In some embodiments, the nucleic acid sequence comprises a sequence defined by SEQ. ID. 41 or a sequence having at least 98,5%, at least 98.6%, at least 98.7%, at least 98.8%, at least 98.9%, at least 99%, at least 99.1%, at least 99.2%, at least 99.3%, at least 99.4%, at least 99.5%, at least 99.6%, at least 99.7%, at least 99.8%, or at least 99.9% sequence identity to SEQ. ID. 41.

[0231] In some embodiments, the nucleic acid sequence comprises a sequence defined by SEQ. ID. 42 or a sequence having at least 98,5%, at least 98.6%, at least 98.7%, at least 98.8%, at least 98.9%, at least 99%, at least 99.1%, at least 99.2%, at least 99.3%, at least 99.4%, at least 99.5%, at least 99.6%, at least 99.7%, at least 99.8%, or at least 99.9% sequence identity to SEQ. ID. 42.

[0232] In some embodiments, the nucleic acid sequence comprises a sequence defined by SEQ. ID. 43 or a sequence having at least 98,5%, at least 98.6%, at least 98.7%, at least 98.8%, at least 98.9%, at least 99%, at least 99.1%, at least 99.2%, at least 99.3%, at least 99.4%, at least 99.5%, at least 99.6%, at least 99.7%, at least 99.8%, or at least 99.9% sequence identity to SEQ. ID. 43.

[0233] In some embodiments, the nucleic acid sequence comprises a sequence defined by SEQ. ID. 44 or a sequence having at least 98,5%, at least 98.6%, at least 98.7%, at least 98.8%, at least 98.9%, at least 99%, at least 99.1%, at least 99.2%, at least 99.3%, at least 99.4%, at least 99.5%, at least 99.6%, at least 99.7%, at least 99.8%, or at least 99.9% sequence identity to SEQ. ID. 44.

[0234] In some embodiments, the nucleotide acid sequence described herein, refers to the corresponding ribonucleic acid sequence.

[0235] ORF6 and ORF8 of SARS-CoV-2 inhibit the type I interferon signaling pathway (Li, J. Y., et al., 2020, Virus research, 286, 198074) and therefore impede an adequate immune response. Therefore, deletion or omission of the sequence of ORF6 and/or ORF8 of SARS-CoV-2 in the vector does not only limit the reproducibility of the encoded viral particles but also increases antigenicity thereof.

[0236] Accordingly, the invention is at least in part based on the discovery that the nucleotide acid sequence of the invention encodes virus particles or parts thereof with a surprising antigenicity and limited replication capabilities.

[0237] In some embodiments, the nucleic acid sequence of the invention is a vector or part of a vector.

[0238] The term “vector”, as used herein, refers to a nucleic acid molecule, capable of transferring or transporting itself and/or another nucleic acid molecule into a cell. The transferred nucleic acid is generally linked to, i.e., inserted into, the vector nucleic acid molecule. A vector may include sequences that direct autonomous replication in a cell, or may include sequences sufficient to allow integration into host cell DNA. In some embodiments, the vector described herein is a vector selected from the group of plasmids (e.g., DNA plasmids or RNA plasmids), shuttle vectors, transposons, cosmids, bacterial artificial chromosomes, and viral vectors.

[0239] In certain embodiments, the invention relates to the vector according to the invention, wherein the vector does not comprise sequence part B and the regulation of sequence part A does not comprise at least one accessory protein.

[0240] In certain embodiments, the invention relates to the vector according to the invention, wherein the vector is a plasm id vector.

[0241] In some embodiments, the plasmid vector described herein has a selection marker and sequence determining the origin of replication. In some embodiments, the invention relates to a vector according to the invention, wherein the vector comprises the sequences defined by the SEQ. ID. 46 and SEQ. ID. 47.

[0242] In some embodiments, the invention relates to a vector according to the invention, wherein the vector comprises at least one sequence encoding an RNA-polymerase promoter and at least one untranslated region that contains sequences that enable the synthesis of negative-strand RNA and/or that enable positive-strand RNA synthesis.

[0243] In some embodiments, the invention relates to a vector according to the invention, wherein the vector comprises at least one sequence encoding an T7 promoter and at least two untranslated regions that contain sequences that enable the synthesis of negative-strand RNA and/or that enable positive-strand RNA synthesis.

[0244] In some embodiments, the invention relates to a vector according to the invention, wherein the vector comprises at least one sequence encoding an T7 promoter as defined by the SEQ. ID. 28, and at least two untranslated regions that comprise the sequences according to the SEQ. ID. 56 and 57.

[0245] In some embodiments, the invention relates to the vector according to the invention, wherein the vector is a plasm id vector.

[0246] In some embodiments, the invention relates to the vector according to the invention, wherein the vector comprises a sequence as defined in SEQ. ID. 45.

[0247] In some embodiments, the nucleotide acid sequence described herein, comprises a sequence having at least 50%, at least 60%, at least 70%, at least 80%, at least 90%, at least 91%, at least 92%, at least 93%, at least 94%, at least 95%, at least 96%, at least 97%, at least 98%, or at least 99% sequence identity to the SEQ. ID. 45.

[0248] In some embodiments, the vector described herein, comprises a sequence i) having at least 50%, at least 60%, at least 70%, at least 80%, at least 90%, at least 91%, at least 92%, at least 93%, at least 94%, at least 95%, at least 96%, at least 97%, at least 98%, or at least 99% sequence identity to the SEQ. ID. 45; and ii) comprising selection marker as defined by the SEQ. ID. 47 and an origin of replication as defined by the SEQ. ID. 46.

[0249] In some embodiments, the vector described herein is used in combination with at least one transfection enhancer, e.g., a transfection enhancer selected from the group of oligonucleotides, lipoplexes, polymersomes, polyplexes, dendrimers, inorganic nanoparticles and cell-penetrating peptides.

[0250] The vector described herein can be used for efficient transfer and/or amplification of the nucleic acid sequence of the invention in an amplifying biotechnological production unit (Example 3).

[0251] The product of the amplification in an amplifying biotechnological production unit (e.g., yeast cells) may be isolated and subsequently translated in a further biotechnological production unit (e.g., human cell).

[0252] Accordingly, the invention is at least in part based on the discovery that the vector described herein enables efficient amplification of the nucleic acids described herein and efficient production of a combination virus-like proteins with limited replication capabilities but high antigenicity. The inventive nucleic acids lead through the above procedure to the production of a dispersion comprising proteins and other building blocks.

[0253] Suitable separation methods known to the person skilled in the art, such as centrifugation or chromatography, can be used to separate these building blocks, if necessary also from residues of the production cell line used or other production aids or organisms, and thus purify them.

[0254] In some embodiments, the building blocks described herein are purified using at least one separation method selected from the group of chromatography, precipitation, ultracentrifugation, tangential-flow filtration, and enzymatic digestion

[0255] These optionally purified virus envelopes or fragments thereof represent the basis of the vaccine, which is then transferred into different dosage forms depending on the type of application.

[0256] Typically, an adjuvant is used for this purpose, stabilizers to improve shelf-life, salts and buffers. The vaccines are thus the product of the long-chain, fully synthetic nucleic acids described here.

[0257] In some embodiments, the invention relates to a virus envelope, a fragment of a virus envelope and/or virus envelope protein obtainable by gene expression using at least one nucleic acid according to the invention using the vector according to the invention, using the kit according to the invention, or the biotechnological production unit according to the invention, wherein the virus envelope, the fragment of a virus envelope and/or the virus envelope protein package the at least one nucleic acid according to the invention.

[0258] In some embodiments, the invention relates to a virus envelope obtainable by gene expression using at least one nucleic acid according to the invention using the vector according to the invention, using the kit according to the invention, or the biotechnological production unit according to the invention.

[0259] The term “virus envelope”, as used herein, refers to protein assembly such as a protein layer that has a stabilizing function for a nucleotide acid sequence (such as the nucleotide acid sequence of the invention). In some embodiments, the virus envelope described herein enables the assimilation of the nucleotide acid sequence of the invention into a human cell. In some embodiments, the virus envelope described herein comprises a spike protein, envelope protein and a membrane protein.

[0260] In some embodiments, the invention relates to a fragment of a virus envelope obtainable by gene expression using at least one nucleic acid according to the invention using the vector according to the invention, using the kit according to the invention, or the biotechnological production unit according to the invention.

[0261] The term “fragment of a virus envelope”, as used herein, refers to at least two assembled proteins that form an incomplete virus envelope.

[0262] In some embodiments, the invention relates to a virus envelope protein obtainable by gene expression using at least one nucleic acid according to the invention using the vector according to the invention, using the kit according to the invention, or the biotechnological production unit according to the invention.

[0263] The term “virus envelope protein”, as used herein, refers to at least one protein that can form part of a viral envelope.

[0264] In some embodiments, the invention relates to a virus envelope, a fragment of a virus envelope and/or virus envelope protein obtainable by gene expression using at least one nucleic acid according to the invention using the vector according to the invention, using the kit according to the invention, or the biotechnological production unit according to the invention, wherein the virus envelope, the fragment of a virus envelope and/or the virus envelope protein package the at least one nucleic acid according to the invention.

[0265] The term “packaged”, as used herein, refers to at least partially engulfed and/or linked. In some embodiments, the packaging nucleotide acid of the invention in the virus envelope, the fragment of a virus envelope and/or the virus envelope protein enables entrance into human cells.

[0266] The products of the nucleic acid and/or the vector of the invention show a particularly high antigenic similarity to the corresponding functional virus, if the products are embodied in a virus envelope, a fragment of a virus envelope and/or virus envelope protein. Therefore, the elicited/induced immune reaction will likely induce an immune reaction that is particularly beneficial for the actual contact with the functional virus.

[0267] The nucleotide acid packaged in the virus envelope, the fragment of a virus envelope and/or the virus envelope protein can be transferred into human cell of a subject and induce production of viral proteins in the human cell. This results in prolonged and enhanced exposure of antigenic virus-like proteins with limited replication capabilities.

[0268] Accordingly, the invention is at least in part based on the discovery that the vector described herein enables efficient production of a combination virus-like proteins with limited replication capabilities but similar antigenic effect to the original virus.

[0269] In some embodiments, the invention relates to the vector of the invention for use in treatment.

[0270] In some embodiments, the invention relates to the biotechnological production unit of the invention for use in treatment.

[0271] In some embodiments, the invention relates to the virus envelope, the fragment of a virus envelope and/or the virus envelope protein of the invention for use in treatment.

[0272] The term “treatment” (and grammatical variations thereof such as “treat” or “treating”), as used herein, refers to clinical intervention in an attempt to alter the natural course of the individual being treated, and can be performed either for prophylaxis or during the course of clinical pathology. Desirable effects of treatment include, but are not limited to, preventing occurrence or recurrence of disease, alleviation of symptoms, diminishment of any direct or indirect pathological consequences of the disease, decreasing the rate of disease progression, amelioration or palliation of the disease state, and remission or improved prognosis.

[0273] In some embodiments, the invention relates the vector, the biotechnological production unit, the virus envelope, the fragment of a virus envelope and/or the virus envelope protein of the invention for use in the treatment of SARS-CoV-2 infections.

[0274] In some embodiments, the invention relates the vector, the biotechnological production unit, the virus envelope, the fragment of a virus envelope and/or the virus envelope protein of the invention for use in the prevention of SARS-CoV-2 infections.

[0275] In some embodiments, the invention relates the vector, the biotechnological production unit, the virus envelope, the fragment of a virus envelope and/or the virus envelope protein of the invention for use in the treatment of active SARS-CoV-2 infections.

[0276] In some embodiments, the invention relates to a vaccine against the coronavirus SARS-CoV-2 comprising at least one nucleic acid according to the invention and products obtainable by gene expression using at least one nucleic acid according to the invention in a production organism.

[0277] In some embodiments, the invention relates to a vaccine against the coronavirus SARS-CoV-2 comprising at least one nucleic acid according to the invention and products obtainable by using the vector according to the invention in a production organism.

[0278] In some embodiments, the invention relates to a vaccine against the coronavirus SARS-CoV-2 comprising at least one nucleic acid according to the invention and products obtainable by using the kit according to the invention in a production organism.

[0279] In some embodiments, the invention relates to a vaccine against the coronavirus SARS-CoV-2 comprising at least one nucleic acid according to the invention and products obtainable by gene expression using at least one nucleic acid according to the invention, using the vector according to the invention, using the kit according to the invention in a production organism, in particular comprising the virus envelope, the fragment of a virus envelope and/or the virus envelope protein according to the invention.

[0280] The term “vaccine”, as used herein, refers to any agent or composition, capable of inducing/eliciting an immune response in a host and which permits to treat and/or prevent an infection and/or a disease. Therefore, non-limiting examples of such agents include proteins, polypeptides, protein/polypeptide fragments, immunogens, antigens, peptide epitopes, epitopes, mixtures of proteins, peptides or epitopes as well as nucleic acids, genes and/or portions of genes (encoding a polypeptide or protein of interest or a fragment thereof).

[0281] The term “against the coronavirus SARS-CoV-2”, as used herein, refers to treatment and/or prevention of a SARS-CoV-2 infection. In some embodiments, the SARS-CoV-2 infection described herein is COVID-19.

[0282] The structural proteins of coronaviruses have shown to elicit an immune response (see, e.g., Li, J. Y., et al., 2020, Virus research, 286, 198074; Walls, A. C., et al., 2020, Cell, 181(2), 281-292.e6; Chen, Z, et al., 2004, Clinical chemistry, 50(6), 988-995; Peng, Y., et al., 2020, Nature immunology, 21(11), 1336-1345.). The means and methods provided enable to inducing/eliciting an equivalent immune response by the production and administration of a vaccine with the equivalent epitopes and/or particles with reduced immune evading mechanisms. In some embodiments, the vaccine induces production of particles with limited replicative capabilities in subject to

[0283] Thus, these vaccines thus differ massively from classical vaccines, which are often derived from animal serum and are therefore molecularly inconsistent. The production from animal organisms is traditionally the method of choice. However, the molecularly unclear products lead to massive quality problems and variation from production batch to production batch. This is also associated with the long approval period and the side effects that are often discovered only late. A molecularly defined product composition, as it can be obtained using the nucleic acid according to the invention, is therefore advantageous.

[0284] Furthermore, the vaccine described herein, is both clearly defined and offers a broad range of antigenic epitopes. This results in the advantage that the vaccine has a low or no requirement for adjuvants that enhance the immune response. Such adjuvants that enhance the immune response are typically associated with side effects such as allergic reactions in some patients. Furthermore, the primary active components of the vaccine as described herein are protein-based and are therefore more thermostable compared to other vaccines (e.g., RNA vaccines). The vaccine of the invention is therefore easily transportable and storable due to its stability.

[0285] Accordingly, the invention is a least in part based on the discovery, that the vaccine as described herein is particularly useful against the coronavirus SARS-CoV-2.

[0286] In some embodiments, the invention relates to a kit comprising two or more nucleic acids according to the invention.

[0287] In some embodiments, the invention relates to a kit comprising at least two nucleic acids selected from the group of SEQ. ID. 35, SEQ. ID. 36, SEQ. ID. 37, and SEQ. ID. 38.

[0288] In this combination of vectors, the kit enables production of viral proteins in a human cell.

[0289] In addition to the said nucleic acid, the invention also relates to a kit comprising two or more nucleic acids, wherein the nucleic acids are deoxyribonucleic acids (DNA) according to one of the preceding claims and/or corresponding ribonucleic acids (RNA) with the corresponding base-pair sequence. In other words, the corresponding ribonucleic acid has sequence parts as defined above in which thymine (T) is replaced by uracil (U).

[0290] The kit described herein, can be prepared by collecting the necessary biotechnological production unit(s) and reagents. If the nucleic acids comprised in the kit are present in the form of DNA, it is further preferred that they are present in at least one plasmid, preferably in two or more plasmids. This allows the nucleic acid to be easily introduced into a corresponding biotechnological production unit, as is also described in the context of the concrete examples below.

[0291] In a particularly embodiment of the present invention, the kits (to be prepared in context) of this invention or the methods and uses of the invention may further comprise or be provided with (an) instruction manual(s). For example, said instruction manual(s) may guide the skilled person (how) to employ the kit of the invention in the diagnostic uses provided herein and in accordance with the present invention. Particularly, said instruction manual(s) may comprise guidance to use or apply the herein provided methods or uses.

[0292] Accordingly, the invention is at least in part based on the discovery, that it enables efficient and safe production of virus particles and/or parts thereof.

[0293] According to another aspect, the invention thus also concerns a biotechnological production unit comprising at least one plasm id as defined above, in particular two or more plasmids. The production unit on which this further aspect of the invention is based is usually a production organism or cell line known to the skilled person for the purposes described

[0294] According to another aspect, the present invention also concerns the product resulting from the application of the corresponding long-chain, fully synthetic nucleic acids in a suitable production organism or cell line. These products belong to the class of envelope proteins, often with additional sugar or fatty acid groups. In concrete terms, this further aspect thus concerns a virus envelope, a fragment of a virus envelope and/or a virus envelope protein obtainable by gene expression using the nucleic acids or using the kit as defined above.

[0295] It is important here that the assignment is mathematically unambiguous: A nucleic acid i produces a product i that is precisely dependent on it. A nucleic acid j that is even slightly different produces another product j that is also precisely dependent on it. The two relationships between product and nucleic acids are unambiguous and describable. Each type of product k can be assigned to a nucleic acid k. It is therefore justified to speak of a direct relationship between the nucleic acid and the product, i.e. the virus envelope or fragments thereof.

[0296] Wherever alternatives for individual separable features are presented here as “embodiments”, it is understood that such alternatives can be freely combined to form discrete embodiments of the invention disclosed herein.

[0297] It should be mentioned that the assembly of virus envelopes is carried out at different speeds and varies in cleanliness depending on the organism and type, so in practice, envelopes and fragments thereof are always found together. If necessary, however, they can be separated by common methods.

[0298] In some embodiments, the envelopes described herein are purified using at least one purification method selected from the group of chromatography, precipitation, ultracentrifugation, tangential-flow filtration, and enzymatic digestion.

[0299] According to a further aspect of the invention, the direct product of the inventive long-chain nucleic acids is thus converted into a vaccine by means of optional purification steps and possible auxiliary means. Specifically, this further aspect thus concerns a vaccine comprising products obtainable by gene expression using at least one nucleic acid or kit as defined above in a production organism, in particular comprising one or more of the above-mentioned protein components or parts thereof.

[0300] This vaccine is typically a physiological saline solution with the above-mentioned additives and typically small concentrations of the above-described virus envelopes and/or fragments.

[0301] Although the vaccine described herein, is less dependent on the effect of adjuvants than other vaccines, the vaccine may still comprise adjuvants to enhance the effect of the vaccine. In some embodiments, the vaccine comprises at least one adjuvant selected from the group of inorganic compounds (e.g., potassium alum, aluminum hydroxide, aluminum phosphate, calcium phosphate hydroxide), oils (e.g., paraffin oil, peanut oil), bacterial products, saponins, cytokines (e.g., IL-1, IL-2, IL-12) and squalene.

[0302] In some embodiments, the vaccine is administered by at least one route of administration selected from the group of oral administration, rectal administration, inhalation, nasal administration, parental administration, intramuscular administration, subcutaneous administration and intradermal administration.

[0303] Typical vaccines are injected or can be applied through the mucous membranes, depending on the dosage form.

[0304] As mentioned above, the vaccine is specifically a vaccine against the coronavirus SARS-CoV-2. Specifically, it comprises at least two molecularly precisely defined protein components selected from the group consisting of the protein components a, b1, b2, c1 or c2, d1 or d2, whereby
[0305] (i) the protein component a comprises the sequence as defined by SEQ. ID. 14 and SEQ. ID. 18 analogous to the S protein of SARS-CoV-2; and
[0306] (ii) the protein component b1 comprises the sequence set out in SEQ. ID. 6 and SEQ. ID. 21 analogous to the envelope protein E of SARS-CoV-2 and protein component b2 comprises the sequence according to SEQ. ID. 8 analogous to the envelope protein E of MHV59A or an equivalent protein; and
[0307] (iii) the protein component c1 comprises the sequence according to SEQ. ID. 10 and SEQ. ID. 22 analogous to the membrane protein M of SARS-CoV-2 and protein component (c2) the sequence according to SEQ. ID. 12 analogous to membrane protein M of MHV59A or an equivalent protein; and
[0308] (iv) the protein component d1 comprises the sequence according to SEQ. ID. 2 and SEQ. ID. 26 analogous to the nucleocapsid phosphoprotein N of SARS-CoV-2 and the protein component d2 comprises the sequence according to SEQ. ID. 4 analogous to the nucleocapsid phosphoprotein N of MHV59A or an equivalent protein.

[0309] It should be noted that the protein components a, b1, b2, c1, c2, d1 or d2 are similar but not identical to the corresponding naturally occurring analogues, which results from the fact that they are produced from synthetic nucleic acids which differ in sequence from the sequence of the corresponding natural nucleic acids.

[0310] The protein component a disclosed within this description comprises a sequence according to SEQ. ID. 14 and SEQ. ID. 18. In some embodiments, the protein component a comprises a sequence having at least 90%, having at least 91%, having at least 92%, having at least 93%, having at least 94%, having at least 95%, at least 96%, at least 97%, at least 98%, at least 99%, at least 99.1%, at least 99.2%, at least 99.3%, at least 99.4%, at least 99.5%, at least 99.6%, at least 99.7%, at least 99.8%, or at least 99.9% sequence identity to SEQ. ID. 14.

[0311] In some embodiments, the protein component a comprises a sequence having at least 90%, having at least 91%, having at least 92%, having at least 93%, having at least 94%, having at least 95%, at least 96%, at least 97%, at least 98%, at least 99%, at least 99.1%, at least 99.2%, at least 99.3%, at least 99.4%, at least 99.5%, at least 99.6%, at least 99.7%, at least 99.8%, or at least 99.9% sequence identity to SEQ. ID. 18.

[0312] The protein component b1 disclosed within this description comprises a sequence according to SEQ. ID. 6 and SEQ. ID. 21. In some embodiments, the protein component b1 comprises a sequence at least 90%, having at least 91%, having at least 92%, having at least 93%, having at least 94%, having at least 95%, at least 96%, at least 97%, at least 98%, at least 99%, at least 99.1%, at least 99.2%, at least 99.3%, at least 99.4%, at least 99.5%, at least 99.6%, at least 99.7%, at least 99.8%, or at least 99.9% sequence identity to SEQ. ID. 6.

[0313] In some embodiments, the protein component b1 comprises a sequence having at least 90%, having at least 91%, having at least 92%, having at least 93%, having at least 94%, having at least 95%, at least 96%, at least 97%, at least 98%, at least 99%, at least 99.1%, at least 99.2%, at least 99.3%, at least 99.4%, at least 99.5%, at least 99.6%, at least 99.7%, at least 99.8%, or at least 99.9% sequence identity to SEQ. ID. 21.

[0314] The protein component b2 disclosed within this description comprises a sequence according to SEQ. ID. 8. In some embodiments, the protein component b2 comprises a sequence having at least 90%, having at least 91%, having at least 92%, having at least 93%, having at least 94%, having at least 95%, at least 96%, at least 97%, at least 98%, at least 99%, at least 99.1%, at least 99.2%, at least 99.3%, at least 99.4%, at least 99.5%, at least 99.6%, at least 99.7%, at least 99.8%, or at least 99.9% sequence identity to SEQ. ID. 8.

[0315] The protein component c1 disclosed within this description comprises a sequence according to SEQ. ID. 10 and SEQ. ID. 22. In some embodiments, the protein component c1 comprises a sequence having at least 90%, having at least 91%, having at least 92%, having at least 93%, having at least 94%, having at least 95%, at least 96%, at least 97%, at least 98%, at least 99%, at least 99.1%, at least 99.2%, at least 99.3%, at least 99.4%, at least 99.5%, at least 99.6%, at least 99.7%, at least 99.8%, or at least 99.9% sequence identity to SEQ. ID. 10.

[0316] In some embodiments, the protein component c1 comprises a sequence having at least 90%, having at least 91%, having at least 92%, having at least 93%, having at least 94%, having at least 95%, at least 96%, at least 97%, at least 98%, at least 99%, at least 99.1%, at least 99.2%, at least 99.3%, at least 99.4%, at least 99.5%, at least 99.6%, at least 99.7%, at least 99.8%, or at least 99.9% sequence identity to SEQ. ID. 22.

[0317] The protein component c2 disclosed within this description comprises a sequence according to SEQ. ID. 12. In some embodiments, the protein component c2 comprises a sequence having at least 90%, having at least 91%, having at least 92%, having at least 93%, having at least 94%, having at least 95%, at least 96%, at least 97%, at least 98%, at least 99%, at least 99.1%, at least 99.2%, at least 99.3%, at least 99.4%, at least 99.5%, at least 99.6%, at least 99.7%, at least 99.8%, or at least 99.9% sequence identity to SEQ. ID. 12.

[0318] The protein component d1 disclosed within this description comprises a sequence according to SEQ. ID. 2 and SEQ. ID. 26. In some embodiments, the protein component d1 comprises a sequence having at least 90%, having at least 91%, having at least 92%, having at least 93%, having at least 94%, having at least 95%, at least 96%, at least 97%, at least 98%, at least 99%, at least 99.1%, at least 99.2%, at least 99.3%, at least 99.4%, at least 99.5%, at least 99.6%, at least 99.7%, at least 99.8%, or at least 99.9% sequence identity to SEQ. ID. 2.

[0319] In some embodiments, the protein component d1 comprises a sequence having at least 90%, having at least 91%, having at least 92%, having at least 93%, having at least 94%, having at least 95%, at least 96%, at least 97%, at least 98%, at least 99%, at least 99.1%, at least 99.2%, at least 99.3%, at least 99.4%, at least 99.5%, at least 99.6%, at least 99.7%, at least 99.8%, or at least 99.9% sequence identity to SEQ. ID. 26.

[0320] The protein component d2 disclosed within this description comprises a sequence according to SEQ. ID. 4. In some embodiments, the protein component d2 comprises a sequence having at least 90%, having at least 91%, having at least 92%, having at least 93%, having at least 94%, having at least 95%, at least 96%, at least 97%, at least 98%, at least 99%, at least 99.1%, at least 99.2%, at least 99.3%, at least 99.4%, at least 99.5%, at least 99.6%, at least 99.7%, at least 99.8%, or at least 99.9% sequence identity to SEQ. ID. 4.

[0321] A protein component with a certain % sequence identity to an amino acid sequence described herein can be obtained for example by insertion, deletion, substitution and/or modification of at least one amino acid, but not more than 10%, not more than 9%, not more than 8%, not more than 7%, not more than 6%, not more than 5%, not more than 4%, not more than 3%, not more than 2%, not more than 1%, not more than 0.9%, not more than 0.8%, not more than 0.7%, not more than 0.6%, not more than 0.5%, not more than 0.4%, not more than 0.3%, not more than 0.2% or not more than 0.1% of the amino acids relative to the amino acid sequence SEQ. ID. 2, SEQ. ID. 4, SEQ. ID. 6, SEQ. ID. 8, SEQ. ID. 10, SEQ. ID. 12, SEQ. ID. 14, SEQ. ID. 18, SEQ. ID. 21, SEQ. ID. 22, and/or SEQ. ID. 26. Such an insertion, deletion, substitution and/or modification can be achieved based on a corresponding nucleotide acid sequence described herein that encodes the desired insertion, deletion, substitution and/or modification (for example a nucleotide acid sequence of a SARS-CoV-2 variant encoding for a mutated variant of a protein component described herein).

[0322] The insertion, deletion, substitution and/or modification can also be the result of a post-translational modification. In some embodiments, the protein component described herein is post-translationally modified to improve the production process. In some embodiments, the protein component described herein is post-translationally modified to improve at least one protein property of the protein component described, such as a protein property selected from the group of antigenicity, protein stability, pharmacokinetic, pharmacodynamic, interactions with drugs and interactions with adjuvants. In some embodiments, the protein component described herein is post-translationally modified by at least technique selected from the group of addition of functional groups, linked to other proteins or peptides, chemical modification of amino acids (e.g., citrullination, deamination, deamidation, eliminylation), disulfide bridges, cysteine amino acid linkage, peptide bond cleavage, isoaspartate formation, racemization and protein splicing.

[0323] Thus, the amino acid sequences described herein do not necessarily have a proportional % sequence identity overlap as the nucleotide acid sequences described herein. In some embodiments, the amino acid sequence of the invention differs at least 10%, at least 9%, at least 8%, at least 7%, at least 6%, at least 5%, at least 4%, at least 3%, at least 2%, at least 1%, at least 0.9%, at least 0.8%, at least 0.7%, at least 0.6%, at least 0.5%, at least 0.4%, at least 0.3%, at least 0.2%, at least 0.1% more from the sequences described in SEQ. ID. 2, SEQ. ID. 4, SEQ. ID. 6, SEQ. ID. 8, SEQ. ID. 10, SEQ. ID. 12, SEQ. ID. 14, SEQ. ID. 18, SEQ. ID. 21, SEQ. ID. 22, and/or SEQ. ID. 26 than the altered nucleotide acid sequences differ from the nucleotide acid sequences described herein.

[0324] In some embodiments, the invention relates to the vaccine according to the invention comprising at least two molecularly precisely defined protein components selected from the group consisting of the protein components a, b1, b2, c1 or c2, d1 or d2, wherein
[0325] (i) the protein component a comprises
   [0326] a) the sequence according to SEQ. ID. 14 analogous to the S protein of SARS-CoV-2 or a sequence having at least 90%, having at least 91%, having at least 92%, having at least 93%, having at least 94%, having at least 95%, at least 96%, at least 97%, at least 98%, at least 99%, at least 99.1%, at least 99.2%, at least 99.3%, at least 99.4%, at least 99.5%, at least 99.6%, at least 99.7%, at least 99.8%, or at least 99.9% sequence identity to SEQ. ID. 14; or
   [0327] b) the sequence according to SEQ. ID. 18 analogous to the S protein of SARS-CoV-2 or a sequence having at least 90%, having at least 91%, having at least 92%, having at least 93%, having at least 94%, having at least 95%, at least 96%, at least 97%, at least 98%, at least 99%, at least 99.1%, at least 99.2%, at least 99.3%, at least 99.4%, at least 99.5%, at least 99.6%, at least 99.7%, at least 99.8%, or at least 99.9% sequence identity to SEQ. ID.18;
[0328] (ii) the protein component b1 comprises
   [0329] a) the sequence according to SEQ. ID. 6 analogous to the envelope protein E of SARS-CoV-2 or a sequence having at least 90%, having at least 91%, having at least 92%, having at least 93%, having at least 94%, having at least 95%, at least 96%, at least 97%, at least 98%, at least 99%, at least 99.1%, at least 99.2%, at least 99.3%, at least 99.4%, at least 99.5%, at least 99.6%, at least 99.7%, at least 99.8%, or at least 99.9% sequence identity to SEQ. ID.6; or
   [0330] b) the sequence according to SEQ. ID. 21 analogous to the envelope protein E of SARS-CoV-2 or a sequence having at least 90%, having at least 91%, having at least 92%, having at least 93%, having at least 94%, having at least 95%, at least 96%, at least 97%, at least 98%, at least 99%, at least 99.1%, at least 99.2%, at least 99.3%, at least 99.4%, at least 99.5%, at least 99.6%, at least 99.7%, at least 99.8%, or at least 99.9% sequence identity to SEQ. ID.21; and
[0331] the protein component b2 comprises the sequence according to SEQ. ID. 8 analogous to the envelope protein E of MHV59A or an equivalent protein comprising a sequence having at least 90%, having at least 91%, having at least 92%, having at least 93%, having at least 94%, having at least 95%, at least 96%, at least 97%, at least 98%, at least 99%, at least 99.1%, at least 99.2%, at least 99.3%, at least 99.4%, at least 99.5%, at least 99.6%, at least 99.7%, at least 99.8%, or at least 99.9% sequence identity to SEQ. ID.8;
[0332] (iii) the protein component c1 comprises
   [0333] a) the sequence according to SEQ. ID. 10 analogous to the envelope protein E of SARS-CoV-2 or a sequence having at least 90%, having at least 91%, having at least 92%, having at least 93%, having at least 94%, having at least 95%, at least 96%, at least 97%, at least 98%, at least 99%, at least 99.1%, at least 99.2%, at least 99.3%, at least 99.4%, at least 99.5%, at least 99.6%, at least 99.7%, at least 99.8%, or at least 99.9% sequence identity to SEQ. ID. 10; or
   [0334] b) the sequence according to SEQ. ID. 22 analogous to the membrane protein M of SARS-CoV-2 or a sequence having at least 90%, having at least 91%, having at least 92%, having at least 93%, having at least 94%, having at least 95%, at least 96%, at least 97%, at least 98%, at least 99%, at least 99.1%, at least 99.2%, at least 99.3%, at least 99.4%, at least 99.5%, at least 99.6%, at least 99.7%, at least 99.8%, or at least 99.9% sequence identity to SEQ. ID.22; and
[0335] the protein component c2 comprises the sequence according to SEQ. ID. 12 analogous to membrane protein M of MHV59A or an equivalent protein comprising a sequence having at least 90%, having at least 91%, having at least 92%, having at least 93%, having at least 94%, having at least 95%, at least 96%, at least 97%, at least 98%, at least 99%, at least 99.1%, at least 99.2%, at least 99.3%, at least 99.4%, at least 99.5%, at least 99.6%, at least 99.7%, at least 99.8%, or at least 99.9% sequence identity to SEQ. ID.12; and
[0336] (iv) the protein component d1 comprises
   [0337] a) the sequence according to SEQ. ID. 2 analogous to the nucleocapsid phosphoprotein N of SARS-CoV-2 or a sequence having at least 90%, having at least 91%, having at least 92%, having at least 93%, having at least 94%, having at least 95%, at least 96%, at least 97%, at least 98%, at least 99%, at least 99.1%, at least 99.2%, at least 99.3%, at least 99.4%, at least 99.5%, at least 99.6%, at least 99.7%, at least 99.8%, or at least 99.9% sequence identity to SEQ. ID. 2; or
   [0338] b) the sequence according to SEQ. ID. 26 analogous to the nucleocapsid phosphoprotein N of SARS-CoV-2 or a sequence having at least 90%, having at least 91%, having at least 92%, having at least 93%, having at least 94%, having at least 95%, at least 96%, at least 97%, at least 98%, at least 99%, at least 99.1%, at least 99.2%, at least 99.3%, at least 99.4%, at least 99.5%, at least 99.6%, at least 99.7%, at least 99.8%, or at least 99.9% sequence identity to SEQ. ID. 26; and
[0339] the protein component d2 the sequence according to SEQ. ID. 4 analogous to the nucleocapsid phosphoprotein N of MHV59A or an equivalent protein comprising a sequence having at least 90%, having at least 91%, having at least 92%, having at least 93%, having at least 94%, having at least 95%, at least 96%, at least 97%, at least 98%, at least 99%, at least 99.1%, at least 99.2%, at least 99.3%, at least 99.4%, at least 99.5%, at least 99.6%, at least 99.7%, at least 99.8%, or at least 99.9% sequence identity to SEQ. ID. 4.

[0340] In some embodiments, the invention relates to the vaccine according to the invention comprising at least two molecularly precisely defined protein components selected from the group consisting of the protein components a, b1, c1, and d1.

[0341] In some embodiments, the invention relates to the vaccine according to the invention comprising at least two molecularly precisely defined protein components selected from the group consisting of the protein components b1, c1, and d1.

[0342] In some embodiments, the invention relates to the vaccine according to the invention comprising at least two molecularly precisely defined protein components selected from the group consisting of the protein components a, c1, and d1.

[0343] In some embodiments, the invention relates to the vaccine according to the invention comprising at least two molecularly precisely defined protein components selected from the group consisting of the protein components a, b1, and d1.

[0344] In some embodiments, the invention relates to the vaccine according to the invention comprising at least two molecularly precisely defined protein components selected from the group consisting of the protein components a, b1, and c1

[0345] In some embodiments, the invention relates to the vaccine according to the invention comprising at least two molecularly precisely defined protein components a and c1

[0346] In some embodiments, the invention relates to the vaccine according to the invention comprising at least two molecularly precisely defined protein components a and d1.

[0347] In some embodiments, the invention relates to the vaccine according to the invention comprising at least two molecularly precisely defined protein components c1 and d1.

[0348] In some embodiments, the invention relates to the vaccine according to the invention comprising at least two molecularly precisely defined protein components a, and b1, c1, and d1.

[0349] In some embodiments, the invention relates to the vaccine according to the invention comprising at least three molecularly precisely defined protein components selected from the group consisting of the protein components a, b1, c1, and d1.

[0350] In some embodiments, the invention relates to the vaccine according to the invention comprising three molecularly precisely defined protein components selected from the group consisting of the protein components a, b1, c1, and d1.

[0351] The vaccine according to the invention comprising the protein components described herein can elicit a substantial and broad immune response. At the same time, the vaccine may be limited in replication capabilities, in that it does not replicate in the body of a subject. Such limited replication capabilities can for example be achieved by omitting or altering required sequences for efficient replication.

[0352] Accordingly, the invention is at least in part based on the discovery that a vaccine comprising the combination of protein components described herein, can show desired limitations in replication capabilities, while largely maintaining the antigenic potential.

[0353] Furthermore, the invention relates to a method for producing the vaccine comprising the successive steps of introducing at least one nucleic acid according to one of claims 1 to 10 into a biotechnological production unit, in particular a cell line, by means of transfection, starting from the nucleic acid-based mRNA, at least two of the protein components selected from the group consisting of the protein components a, b1, b2, c1, c2, d1 or d2 are prepared by translation and the protein components obtained thereof are purified.

[0354] In some embodiments, the invention relates to a method for the production of the vaccine according to the invention comprising the successive steps of
[0355] a) introducing the vector according to one of embodiments 10 to 14 into a biotechnological production unit, in particular a cell line,
[0356] wherein, the nucleic acid-based mRNA coding for at least two of the protein components selected from the group consisting of the protein components a, b1, b2, c1, c2, d1 or d2 are prepared by translation;
[0357] b) obtaining protein components from the biotechnological production unit in step a); and
[0358] c) purifying the obtained protein components to obtain the vaccine according to the invention.

[0359] In some embodiments, the invention relates to a biotechnological production unit comprising at least one vector according to the invention.

[0360] The terms “biotechnological production unit” and “production organism” are used herein interchangeably and refer to at least one host cell into which the nucleic acid of the invention has been introduced for expression, including the progeny of such cells, organisms and biotechnological units that comprise such cells and/or progeny of such cells. Host cells include “transformants” and “transformed cells,” which include the primary transformed cell and progeny derived therefrom without regard to the number of passages. The progeny may not be completely identical in nucleic acid content to a parent cell but may contain mutations. Mutant progeny that have the same function or biological activity as screened or selected for in the originally transformed cell are included herein.

[0361] The term “amplifying biotechnological production unit” refers to any biotechnological production unit that allows amplification of large vectors (e.g., more than 4000 bases, more than 10000 bases, more than 35000 bases). In some embodiments, the amplifying biotechnological production unit described herein comprises a yeast cell.

[0362] In certain embodiments, the host cell is a stem cell. In other embodiments, the host cell is a differentiated cell.

[0363] The biotechnological production unit described herein is particularly useful, if it comprises a cell that allows viral entry of SARS-CoV-2, such that the product of cells of the biotechnological production unit can enter further cells of the biotechnological production unit. This subsequent infection of cells of the biotechnological production facilitates and accelerates the process of bringing the vector into the host cells.

[0364] In some embodiments, the biotechnological production unit described herein comprises a cell that allows viral entry of SARS-CoV-2. In some embodiments, the biotechnological production unit described herein comprises a cell that expresses the human ACE2 receptor or a functional human-like ACE2 receptor. The human-like ACE2 receptors that allow viral entry of SARS-CoV-2 are known to the person skilled in the art (see, e.g., Damas, J., et al., 2020, Proceedings of the National Academy of Sciences, 117(36), 22311-22322).

[0365] In some the biotechnological production unit described herein comprises at least one cell type selected from the group of HEK293, MDCK, Chinese hamster ovary (CHO), SF9, Vero, MRC 5, Per.C6, PMK, and WI-38.

[0366] In some embodiments, the biotechnological production unit described herein comprises a cell that is at least partially human or a cell of an at least partially human cell line.

[0367] In some embodiments, the biotechnological production unit described herein comprises a cell that allows the production of a viral particle comprising the nucleotide of the invention or the vector of the invention that is selectively replicable in it is fully replicable in cells of the biotechnological production unit but not or unsubstantially in cells of the human body. This selective replicability is achieved by cells that comprise complementary proteins for the replication of the viral particle (see e.g. Example).

[0368] In some embodiments, the biotechnological production unit described herein comprises a cell that can express at least one protein for viral replication. In some embodiments, the biotechnological production unit described herein comprises a cell that can express at least one protein component for viral replication that is not encoded in the nucleotide acid sequence of the invention or the vector of the invention.

[0369] Transduction of host cells by the vector of the invention can be achieved by stable or transient transduction (see, e.g., Stepanenko, A. A., and Heng, H. H., 2017, Mutation Research/Reviews in Mutation Research, 773, 91-103).

[0370] If DNA is introduced into the production unit according to a first embodiment, this is usually done using a plasm id suitable for this purpose.

[0371] Alternatively, the DNA may be introduced into the biotechnological production unit by any kind of vector.

[0372] If, on the other hand, RNA is introduced according to a second embodiment, a sequence coding for the RNA-dependent RNA polymerase (according to SEQ. ID. 30) is introduced in addition to the sequences coding for the protein components a, b1, b2, c1, c2, d1 or d2. This sequence makes it possible to first form a negative RNA strand from the positive RNA strand present as a template and then to produce the corresponding messenger RNA from it.

[0373] In the context of this second embodiment of the procedure, it is preferred that the vaccine obtained additionally comprises a fully synthetic, long-chain ribonucleic acid (according to SEQ. ID. 33 or 34), which is obtainable by enzymatic transcription.

[0374] In the context of this second embodiment of the procedure, it is also preferred that the vaccine obtained additionally comprises a fully synthetic, long-chain ribonucleic acid (according to SEQ. ID. 33 or 34), which is obtainable via the T7 transcription of the sequence according to SEQ. ID. 28.

[0375] “a,” “an,” and “the” are used herein to refer to one or to more than one (i.e., to at least one, or to one or more) of the grammatical object of the article.

[0376] “or” should be understood to mean either one, both, or any combination thereof of the alternatives.

[0377] “and/or” should be understood to mean either one, or both of the alternatives. Throughout this specification, unless the context requires otherwise, the words “comprise”, “comprises” and “comprising” will be understood to imply the inclusion of a stated step or element or group of steps or elements but not the exclusion of any other step or element or group of steps or elements.

[0378] The terms “include” and “comprise” are used synonymously. “preferably” means one option out of a series of options not excluding other options. “e.g.” means one example without restriction to the mentioned example. By “consisting of” is meant including, and limited to, whatever follows the phrase “consisting of.”

[0379] Reference throughout this specification to “one embodiment”, “an embodiment”, “a particular embodiment”, “a related embodiment”, “a certain embodiment”, “an additional embodiment”, “some embodiments”, “a specific embodiment” or “a further embodiment” or combinations thereof means that a particular feature, structure or characteristic described in connection with the embodiment is included in at least one embodiment of the present invention. Thus, the appearances of the foregoing phrases in various places throughout this specification are not necessarily all referring to the same embodiment. Furthermore, the particular features, structures, or characteristics may be combined in any suitable manner in one or more embodiments. It is also understood that the positive recitation of a feature in one embodiment, serves as a basis for excluding the feature in a particular embodiment.

[0380] The invention is further illustrated by the following design examples in combination with the attached figures, which do not limit the scope of the invention described in the claims.

### DESCRIPTION OF THE FIGURES

[0381] FIG. 1: Plasmid maps of the mono-cistronic expression plasm ids coding for the nucleocapsid protein (N) (SEQ. ID. 35), envelope protein (E) (SEQ. ID. 36), membrane protein (M) (SEQ. ID. 37) and spike glycoprotein (S) (SEQ. ID. 38) of SARS-CoV2. The numbers on the inside the plasmid maps indicate the DNA coordinates in base-pairs. The protein-coding sequences of N, E, M and S are represented by arrows and stand for the DNA and protein sequences with the SEQ. ID. 1,2,3 and 4 (N), 5,6,7 and 8 (E), 9, 10, 11 and 12 (M), 13 and 14 (S) as set forth in the Sequence Listing.

[0382] FIG. 2: Genome map of the poly-cistronic expression construct COVAX191AN (SEQ. ID. 33 and 39) (upper figure) which, together with the mono-cistronic expression plasmid pcDNA34 syn N (SEQ. ID. 35) (lower figure) can be used for vaccine production in cell lines as shown in example 2. The numbers refer to the DNA coordinates in kilobases (K) for COVAX191AN and refer to the base-pair positions for the pcDNA34 syn N construct (SEQ. ID. 35). Protein-coding sequences of the polyprotein 1a and 1 b, E, M S (upper figure) and the nucleocapsid protein syn N (lower figure) are represented by arrows.

[0383] FIG. 3: Agarose gel electrophoresis size separation of the mono-cistronic, plasmid-based expression constructs for the nucleocapsid protein (N), envelope protein (E), membrane protein (M) and the spike glycoprotein (S). The left side of the gel shows the MHV A59 (MHV) derived constructs for the nucleocapsid protein (N), envelope protein (E) and the membrane protein (M). The right side of the gel shows the derived constructs based on the SARS-CoV2 for the nucleocapsid protein (N), envelope protein (E), membrane protein (M) and the spike glycoprotein (S).

[0384] FIG. 4: Schematic illustration with the corresponding DNA sequencing cover graph of the circular 40,556 bp DNA construct COVAX191AN (SEQ. ID. 40) (upper figure) and the 38,383 bp DNA construct COVAX191ANAHE (SEQ. ID. 40) (lower figure). The arrows indicate the positions of the protein-coding sequences for the recoded CDS of the replicative polyproteins 1A and 1B (1A,1B), the hemagglutinin esterase (HE), the spike glycoprotein (S), the envelope protein (E) and the membrane protein (M). The complete genomes of COVAX191AN and COVAX191ANAHE were assembled from 6 synthetic DNA blocks using a single lithium acetate yeast transformation and selected for the auxotrophic URA3 marker.

[0385] FIG. 5: Schematic illustration of the SARS-CoV-2 genome and the deletion variants generated.

[0386] FIG. 6: Vector map of pcDNA3.1/Hygro(+)_ORF7a for trans-complementary expression of ORF7a (SEQ. ID. 61)

[0387] Table 51: DNA assembly efficiency of COVAX191 in S. cerevisiae (yeast)

### EXAMPLES

[0388] The following examples illustrate how the inventive long-chain nucleic acids encoding for the envelope proteins E, M, N and S are produced and used in a biotechnological process to stimulate cells to produce corona virus envelopes or fragments thereof.

[0389] For the production, the (digital) sequences according to the present invention are transferred into the corresponding physically present long-chain fully synthetic nucleic acid molecules by the process of chemical DNA synthesis.

### Example 1

[0390] In the first example, the resulting long-chain, fully synthetic nucleic acids encoding the envelope proteins E, M, N and S are mono-cistronic, i.e. they are produced under the control of a separate promoter (SV40, CMV, EF-1, chicken 13 actin promoter or hybrid promoters) and other optional translation initiation signals (Kozak consensus sequence) and nuclear mRNA export signals (Chuck Wood sequence) into expression plasmids for eukaryotic cells. The sequences as revealed in SEQ. ID. 35, SEQ. ID. 36, SEQ. ID. 37 and SEQ. ID. 38, and FIG. 1 shall serve as an example of such an expression system. Other embodiments with other expression plasmids, the corresponding resistance genes and promoters are possible and are known to the person skilled in the art.

[0391] The resulting 4 expression plasmids are amplified in Escherichia coli, purified by standard chemical-physical procedures and then introduced by transfection into a eukaryotic cell line (HEK293, Chinese hamster ovary (CHO), SF9, Vero). Transfection is performed by standard procedures such as calcium phosphates, lipofection, electroporation.

[0392] After transfection, the cells, starting from the transfected plasmid DNA, begin to translate the messenger RNA (mRNA), from which the envelope proteins E, M, N and S are expressed by translation. These proteins spontaneously assemble in the cells to form corona virus envelopes and are then released by the cells by exocytosis into the culture medium, where they accumulate after 5-7 days.

[0393] Chemical-physical processes are used for the purification of envelope proteins, virus envelopes and their fragments. For this purpose, the cell culture supernatant is separated from the cells by centrifugation. In the subsequent step, the virus envelopes are further purified from impurities and other components of the culture medium by chromatographic column separation methods. The material thus obtained in its pure form, consisting of the coronavirus envelopes, forms the basis of the vaccine, which is then converted into various forms for administration depending on the type of application. Typically, an adjuvant is used for this purpose, stabilizers to improve the shelf-life, salts and buffers. The vaccines are thus the product of the long-chain, fully synthetic nucleic acids described here.

### Example 2

[0394] In the second example, the long-chain, fully synthetic nucleic acids encoding the envelope proteins E, M and S are expressed together with a fully synthetic nucleic acid encoding the RNA-dependent RNA polymerase. In this poly-cistronic expression system as revealed by the sequences SEQ. ID. 39 and SEQ. ID. 40 and shown in FIG. 2, the envelope proteins E, M and S are directly transcribed from a negative RNA strand, including the RNA-dependent RNA polymerase. If not all classes of envelope proteins of the sequence groups A-D are expressed RNA-dependent, additional expression plasm ids as described in example 1 can be used to express the complete set of envelope proteins for the biotechnological production of virus envelopes in cell lines. In example 2, the expression plasm id coding for the N protein is used for this purpose (SEQ. ID. 35) (see FIG. 2).

[0395] The purification of the plasmids, the transfection of the long-chain nucleic acids, as well as the purification of the virus envelopes, largely follows the process sequence described in example 1. However, the process includes an additional step in which the long-chain nucleic acid, as described in SEQ. ID. 39 and SEQ. ID. 40, is transformed by a T7 RNA polymerase into the corresponding RNA form according to SEQ. ID. 33 and SEQ. ID. 34 before transfection. This positive RNA strand leads to the production of the RNA-dependent RNA polymerase in the cell line, which produces a negative RNA strand from it. Transcription of the messenger RNA (mRNA) from this negative RNA strand then takes place, which leads to the production and assembly of the envelope proteins in virus envelopes.

[0396] The vaccine produced in this way differs from the vaccine described in the first example 1 in that, in addition to the envelope proteins obtained through the gene expression of the corresponding deoxyribonucleic acid, it contains a fully synthetic, long-chain ribonucleic acid which is expressed via the T7 transcription of the sequences SEQ. ID. 39 and SEQ. ID. 40.

[0397] The second example 2 has the advantage over the first application example that it produces virus envelopes that multiply themselves in a helper cell line expressing the

[0398] N protein. This is possible because the virus envelopes formed in this way additionally contain a positive RNA strand that codes for the RNA-dependent RNA polymerase and the envelope proteins E, M and S. If these virus envelopes are taken up by a cell, the cell itself is stimulated to produce virus envelopes. If the cell expresses the N protein episomally, which is the case for the vaccine production cell line, self-replicating virus envelopes are formed. This simplifies the production process and can be done without expensive transfection reagents. If the target cell does not express any N-protein, virus envelopes are also formed from it, but then they are devoid of a packaged RNA strand and can no longer self-replicate. These virus envelopes have the same chemical/physical structure and the same antigenicity as virus envelopes produced by the manufacturing process shown in example 1. Example 2 allows the production of virus envelopes, fragments and virus envelope proteins in further helper cell lines and production organisms as well as the direct application as RNA vaccine.

[0399] Methods:

[0400] Cultivation of Bacteria and Yeast Strains

[0401] Escherichia coli (E. coli) DH5alpha was cultivated in Luria-Broth (LB) at 37° C. Saccharomyces cerevisiae VL6-48N (Kouprina et al. 2006 Methods in Mol. Biol. 349, 85-101) was cultivated either in yeast peptone-dextrose (YPD) medium or synthetic dropout (SD) medium without uracil at 30° C.

[0402] Sequence design and de-novo DNA synthesis.

[0403] DNA sequences for mono-cistronic and poly-cistronic expression constructs were assembled from sequence parts disclosed in the attached sequence list (SEQ. ID. 1 to 40). Synthesis restrictions were removed computationally by synonymous codon replacement and application of the desired base substitutions within intergenic sequences. To define the optimal retro-synthetic assembly route, the synthesis-optimized DNA designs were hierarchically divided into smaller DNA fragments suitable for low-cost synthesis by commercial suppliers. The partitioning strategy was designed as a four-step, hierarchical assembly process. Sub-blocks with a size of 1.4 kb (kilobases) were assembled to blocks of 5.4 kb and further assembled to segments with a size of 16 kb and then into the final COVAX constructs of 35 to 40 kb. The linear DNA assembly parts have homology overlaps at the ends and nested 3′ prefix and 5′ suffix sequences to integrate assembled DNA parts into vectors and allow hierarchical assembly of the final COVAX DNA designs. The DNA assembly parts were obtained from commercial suppliers by low-cost DNA synthesis as sequence-verified, clonal plasmid constructs and double-stranded linear DNA.

[0404] Production of the mono-cistronic expression constructs:

[0405] The synthetic nucleic acid sequences covering the complete protein-coding sequences of the S-protein of SARS-2 CoV, the M-protein, the N-protein and the E-protein of SARS-CoV-2 or MHV were amplified by polymerase amplification techniques (PCR) from sequence-verified synthetic DNA. Translation initiation sites before the start codon were introduced by oligonucleotide primers. The PCR products were separated by agarose gel electrophoresis according to their molecular weight and then purified over a nucleospin column (NucleoSpin Gel and PCR Clean-up Kit, Macherey nail). PCR products were cloned into the pcDNA3.4 vector using the Topo-TA cloning kit (TOPO-TA cloning kit, ThermoFisher). The molecular weight of the plasmids was determined by agarose gel electrophoresis (FIG. 3) and the DNA sequence was checked by Sanger sequencing.

[0406] Production of the Poly-Cistronic COVAX DNA Constructs:

[0407] The DNA assembly parts for the poly-cistronic COVAX DNA constructs were released from plasmids by restriction digestion using the Type IIS restriction enzymes (Bbsl, BspQI, Pacl and Pmel (New England Biolabs)). Equimolar amounts of DNA inserts (100 ng, 0.115 μmol) and linearized vector pXMCS2 (100 ng, 0.038 μmol) were incubated together with T5 exonuclease, phusion polymerase and Taq DNA ligase for one hour at 50° C. After isothermal assembly, the constructs were electroporated into E. coli DH5alpha cells (BioRad MiniPulser). The cells were incubated in LB medium for one hour and then plated out on LB plates. Segments and complete COVAX construct were assembled from blocks by yeast recombination using the plasmid pMR10Y (pMR10::CEN/ARS::URA3, Christen et al. 2015, ACS Synthetic Biology, 4, 927-934) according to the lithium acetate transformation method (Gietz et al 2007, Nature Protocols, 2, 31-34). Saccharomyces cerevisiae VL6-48N was grown overnight in 5 ml YPD, diluted 1:20 in 50 ml YPD and incubated for 4 h. The cells were collected by centrifugation at 1,000 rcf for 5 min, washed with 25 ml distilled water and centrifuged at 3,000 rcf for 5 min. The pellet was dissolved in 1 ml lithium acetate mixture (0.1 M lithium acetate, 0.01 M Tris-HCl, pH 7.5, 0.001 M EDTA, pH 8.0). Next, 100 μl single-stranded salmon sperm DNA (1% w/v salmon sperm DNA (ssDNA), 0.01 M Tris-HCl, pH 7.5, 0.001 M EDTA, pH 8.0) and 6 ml PEG-mix (40% w/v poly (ethylene glycol) 3015-3685 g/mol, 0.01 M Tris-HCl, pH 7.5, 0.001 M EDTA, pH 8.0) were added. From the PEG cell mix, 710 μl aliquots were combined with 100 ng of digested DNA blocks and 250 ng of linearized pMR10Y vector (Pact, Pmel). The samples were incubated for 30 minutes at 30° C. After incubation, 70 μl dimethyl sulfoxide (DMSO) was added and the samples were subjected to heat shock at 42° C. for 15 minutes. The cells were collected by centrifugation at 1000 rcf for 2 minutes and then plated out on SD plates without uracil and cultivated at 30° C. for three days until colonies became visible (see table 51).

[0408] Sequence verification of the COVAX DNA constructs.

[0409] Sequence verification of the assembled DNA constructs was performed on an iSeq instrument (IIlumina) using the Nextera DNA Flex Library Prep-Kit. Genomic DNA of ura+yeast transformants was fragmented and processed according to the tagging protocol as specified by the manufacturer. Sequences were calculated de novo from the read sequences and the created contigs were compared with the reference sequences using the CLC Genomics Workbench software (Quiagen). The complete assembly of COVAX191AN and COVAX191AHEN was confirmed with a completely closed sequence coverage plot (FIG. 4).

### Example 3

[0410] Yeast clones each containing one of the circular sequences (viral sequences, T7 promoter and polyA-signal as well as vector, all together in one yeast artificial chromosome or “YAC”) were be grown, harvested and the YACs extracted thereof. The so-obtained YAC were cut with the restriction enzyme Eagl, leading to a double-stranded DNA molecule linearized directly after the polyA-signal. After making these DNA molecules RNase-free by standard treatment with Proteinase K followed by Trizol (phenol/chloroform) extraction, single-stranded RNA corresponding to the vaccine virus genome were obtained by in vitro transcription using T7 polymerase. The so obtained RNA were transfected into suitable cell lines (HEK293T or Vero cells). In the case of the positive control, the full-length construct “GBsyn_V33” unaltered HEK293 or Vero cells supported the replication of the RNA genome, the generation of subgenomic mRNAs and hence translation into viral proteins. These, together with the positive-strand RNA genome, and components from the cell membrane, formed progeny viruses, in this case wild-type, natural SARS-CoV-2 viruses. In the case of the deletion mutants, the gene or genes deleted in the virus genome are transfected into the cell lines in the form of DNA, leading to the transient expression of the protein or proteins, and thereby providing the missing factor required for enabling the generation of progeny virus. Alternatively (and preferred), cultivation of those cells under selection pressure leads to the stable integration of the gene or the genes into the cell genome, from where the protein or proteins are continuously expressed (with expression we understand the generation of mRNA from the gene and the subsequent translation into proteins). Such cells, either transiently or stably expressing the proteins made from the genes missing in the vaccine virus genome, enable a continuous production of vaccine viruses, characterized by a full set of structural proteins and a vaccine virus genome having one or several genes deleted. The so obtained vaccine viruses were purified in a so-called downstream processing (DSP) process characterized by clarification (separation of cells from the vaccine viruses), DNA digestion by Benzoase, Ultra Filtration/Dia Filtration (“UF/DF”) and finally sterile filtration (0.22 μm filtration).

### Example 4

[0411] De novo synthesis of a fully synthetic vector according to the methods described in Example 1 to 3 with an additional deletion or ORF7a: The de novo synthesis can use SEQ. ID. 60, SEQ. ID.41, SEQ. ID 42, SEQ. ID. 43, SEQ. ID. 44 as a reference sequence. Thereby, the functionality and/or expression of ORF7a encoding nucleotide sequence can be removed by a deletion and/or implementation of a dysfunctionality of the nucleotides 27388-27393 of SEQ. ID. 60, nucleotides 27000-27365 of SEQ. ID. 41, nucleotides 27196-27561 of SEQ. ID. 42, nucleotides 27000-27365 of SEQ. ID. 43 or nucleotides 27474-27839 of SEQ. ID. 44. Therefore a deletion of ORF7a alone or in combination with deletions E-protein, ORF6 and/or ORF8 may be achieved.

[0412] To facilitate the expression of such a vector a plasmid comprising SEQ. ID. 61 may be used for trans-complementary expression of the ORF7a.

1. Fully synthetic, long-chain nucleic acid with at least 4,000 bases, characterised in that the nucleic acid comprises
a) at least two of the four sequence parts A-D in any arrangement, wherein
i) Sequence part A comprises a sequence as defined in SEQ. ID. 50 or a sequence having at least 98.5% sequence identity to the sequence as defined in SEQ. ID. 50;
ii) Sequence part B comprises a sequence as defined in SEQ. ID. 48 or a sequence having at least 98.3% sequence identity to the sequence as defined in SEQ. ID. 48;
iii) Sequence part C comprises a sequence as defined in SEQ. ID. 49 or a sequence having at least 97.2% sequence identity to the sequence as defined in SEQ. ID. 49;
iv) Sequence part D comprises a sequence as defined in SEQ. ID. 17 or a sequence having at least 98.5% sequence identity to the sequence as defined in SEQ. ID. 17; or
encompasses a ribonucleic acid sequence corresponding to the deoxyribonucleic acid sequence according to the sequence parts A-D; and
b) 1.) a nucleic acid sequence part encodes an amino acid sequence having the function of a SARS-CoV-2 amino acid sequence encoded by ORF7a; and/or
2.) a nucleic acid sequence part encodes an amino acid sequence having the function of a SARS-CoV-2 amino acid sequence encoded by ORF3a.

2. The nucleic acid according to claim 1, characterized in that it has at least 8′000 bases, preferably at least 20′000 bases, in a defined sequence.

3. The nucleic acid according to claim 1 or 2, characterized in that the nucleic acid comprises not more than one or no ORF-associated nucleic acid sequence parts, wherein the ORF-associated nucleic acid sequence part encodes an amino acid sequence having the function of a SARS-CoV-2 amino acid sequence encoded by ORF6 or ORFS.

4. The nucleic acid according to claim 3, wherein the nucleic acid comprises no ORF-associated nucleic acid sequence part, wherein the ORF-associated nucleic acid sequence part encodes an amino acid sequence having the function of a SARS-CoV-2 amino acid sequence encoded by ORF6 or ORF8.

5. The nucleic acid according to one of the preceding claims, wherein the nucleic acid additionally comprises
a) 1.) an ORF1ab sequence defined by the SEQ. ID. 51 or a sequence having at least 98,5% sequence identity to SEQ. ID. 51; or
2. i) an ORF1b sequence defined by the SEQ. ID. 59 or a sequence having at least 98,5% sequence identity to SEQ. ID. 59; and
ii) a n ORF1a sequence defined by the SEQ. ID. 58 or a sequence having at least 98,6% sequence identity to SEQ. ID. 58; and
b) an ORF3a sequence defined by the SEQ. ID. 52 or a sequence having at least 99% sequence identity to SEQ. ID 52.

6. The nucleic acid according to claim 7, wherein the nucleic acid additionally comprises
a) an ORF6 sequence defined by the SEQ. ID. 53 or a sequence having at least 94,1% sequence identity to SEQ. ID 53; and/or
b) an ORF8 sequence defined by the SEQ. ID. 55 or a sequence having at least 99% sequence identity to SEQ. ID 55.

7. The nucleic acid according to one of the preceding claims, characterized in that sequence parts A to C correspond to the sequence according to SEQ. ID. 19 or the corresponding ribonucleic acid sequence.

8. The nucleic acid according to any of the preceding claims, characterized in that the nucleic acid comprises in any arrangement at least three of the four sequence parts A-D or at least three of four sequence parts with a ribonucleic acid sequence corresponding to the deoxyribonucleic acid sequence according to the sequence parts A-D.

9. The nucleic acid according to any of the preceding claims, characterized in that the nucleic acid comprises in any arrangement the four sequence parts A-D or four sequence parts with a ribonucleic acid sequence corresponding to the deoxyribonucleic acid sequence according to the sequence parts A-D.

10. The nucleic acid according to any one of claims 1 to 6, characterized in that the nucleic acid comprises two or three of the four sequence parts A-D.

11. The nucleic acid according to claim 10, characterized in that the nucleic acid comprises three of the four sequence parts A-D.

12. The nucleic acid according to one of the preceding claims, characterized in that the nucleic acid additionally comprises SEQ. ID. 28 and/or SEQ. ID. 29 or the corresponding ribonucleic acid sequence.

13. The nucleic acid according to one of the preceding claims, characterized in that it has a maximum size of 1′000′000 bases, preferably a maximum size of 200′000 bases.

14. A vector comprising the nucleic acid according to one of the preceding claims.

15. The vector according to claim 14, wherein the vector comprises the sequences defined by the SEQ. ID. 46 and SEQ. ID. 47.

16. The vector according to any one of the claims 14 to 15, wherein the vector is a plasm id vector.

17. A kit comprising two or more nucleic acids according to one of claims 1 to 13.

18. The kit according to claim 17, wherein the nucleic acids are present in at least one plasmid, preferably in two or more plasm ids.

19. A biotechnological production unit comprising at least one vector according to claims 14 to 16.

20. A virus envelope, a fragment of a virus envelope and/or virus envelope protein obtainable by gene expression using at least one nucleic acid according to one of claims 1 to 3, using the vector according to one of claims 14 to 16, using the kit according to one of claim 17 or 18, or the biotechnological production unit according to claim 19, wherein the virus envelope, the fragment of a virus envelope and/or the virus envelope protein package the at least one nucleic acid according to one of claims 1 to 13.

21. A vaccine against the coronavirus SARS-CoV-2 comprising at least one nucleic acid according to one of claims 1 to 13 and products obtainable by gene expression using at least one nucleic acid according to one of the claims 1 to 13, using the vector according to one of claims 14 to 16, using the kit according to one of the claim 17 or 18 in a production organism, in particular comprising the virus envelope, the fragment of a virus envelope and/or the virus envelope protein according to claim 20.

22. The vaccine according to claim 21 comprising at least two molecularly precisely defined protein components selected from the group consisting of the protein components a, b1, c1, or d1 wherein
(i) the protein component a comprises
a) the sequence according to SEQ. ID. 14 analogous to the S protein of SARS-CoV-2 or a sequence having at least 90% sequence identity to SEQ. ID. 14; or
b) the sequence according to SEQ. ID. 18 analogous to the S protein of SARS-CoV-2 or sequence having at least 90% sequence identity to SEQ. ID.18;
(ii) the protein component b1 comprises
a) the sequence according to SEQ. ID. 6 analogous to the envelope protein E of SARS-CoV-2 or a sequence having at least 90% sequence identity to SEQ. ID.6; or
b) the sequence according to SEQ. ID. 21 analogous to the envelope protein E of SARS-CoV-2 or a sequence having at least 90% sequence identity to SEQ. ID.21; and
(iii) the protein component c1 comprises
a) the sequence according to SEQ. ID. 10 analogous to the envelope protein M of SARS-CoV-2 or a sequence having at least 90% sequence identity to SEQ. ID. 10; or
b) the sequence according to SEQ. ID. 22 analogous to the membrane protein M of SARS-CoV-2 or a sequence having at least 90% sequence identity to SEQ. ID.22; and
(iv) the protein component d1 comprises
a) the sequence according to SEQ. ID. 2 analogous to the nucleocapsid phosphoprotein N of SARS-CoV-2 or a sequence having at least 90% sequence identity to SEQ. ID. 2; or
b) the sequence according to SEQ. ID. 26 analogous to the nucleocapsid phosphoprotein N of SARS-CoV-2 or a sequence having at least 90% sequence identity to SEQ. ID. 26.

23. A method for the production of the vaccine a vaccine against the coronavirus SARS-CoV-2 comprising the successive steps of a) introducing the nucleotide acid sequence according to one of claims 1 to 13 into a biotechnological production unit, in particular a cell line, wherein, the nucleic acid-based mRNA coding for at least two of the protein components selected from the group consisting of the protein components a, b1, b2, c1, c2, d1 or d2 are prepared by translation;
b) obtaining protein components from the biotechnological production unit in step a); and
c) purifying the obtained protein components to obtain the vaccine against the coronavirus SARS-CoV-2.

24. A method for the production of a vaccine against the coronavirus SARS-CoV-2 comprising the virus envelope, the fragment of a virus envelope and/or the virus envelope protein according to claim 20 comprising the successive steps of:
a) introducing the nucleotide acid sequence according to one of claims 1 to 13 into a biotechnological production unit, wherein the biotechnological production unit comprises a nucleotide acid coding for at least one of the protein components selected from the group consisting of the protein components a, b1, c1, and d1.
b) obtaining a fragment of a virus envelope and/or virus envelope protein from the biotechnological production unit in step a); and
c) purifying the obtained protein components to obtain the vaccine against the coronavirus SARS-CoV-2 comprising the virus envelope, the fragment of a virus envelope and/or the virus envelope protein according to claim 20.

25. A method for the production of a vaccine against the coronavirus SARS-CoV-2 comprising the successive steps of:
a) introducing the vector according to one of claims 14 to 16 into an amplifying biotechnological production unit;
b) amplifying the nucleotide acid according to one of claims 1 to 13 in the amplifying biotechnological production unit;
c) obtaining the nucleotide acid amplified in step b);
d) obtaining the vaccine against the coronavirus SARS-CoV-2 by using method according to claim 23 or 24.

The application's sequence listing, which the Patent Office published only in electronic form, follows.

SEQUENCE LISTING (61 sequences)

SEQ ID NO: 1 - DNA, 1263 bp, Artificial Sequence
  COVAX192_N
atggtgtctgataatggacctcaaaatcagcgaaatgcacctcgcattacgtttggtggaccatcagattcaactggcagtaaccagaatggagaacgaagtggtgcgcgatcaaaacaacgccgcccgcaaggtttacccaataatactgcgtcttggttcaccgctctcactcaacatggcaaggaagatttaaaattccctcgaggacaaggcgttccaattaacaccaatagcagtccagatgaccaaattggctactaccgccgcgccacaagacgaattcgtggtggtgatggtaaaatgaaagatctcagtccaagatggtatttctactatctaggaactgggccagaagctggacttccttatggtgctaacaaagatggcatcatatgggttgcaactgagggagccttgaatacaccaaaagatcacattggcaccagaaatcctgctaacaatgctgcaatcgtgctacaacttcctcaaggaacaacattaccaaaaggtttttacgcagaagggtctagaggtggaagtcaagcctcttctagatcatcatcacgtagtcgcaacagttcaagaaattcaactccaggttcaagtagaggaacttctcctgctagaatggctggaaatggaggtgatgctgctcttgctttgttactacttgacagattgaaccagcttgagagcaaaatgtctggtaaaggccaacaacaacaaggccaaactgtcactaagaaatctgctgctgaggcttctaagaagcctagacaaaaacgtactgccactaaagcatacaatgtaacacaagctttcggcagacgtggtccagaacaaactcaaggaaattttggggatcaggaactaatcagacaaggaactgattacaaacattggccgcaaattgcacaatttgctccttctgcttcagcgttctttggaatgtcgagaattggaatggaagtcacaccttcgggaacatggttgacctatacaggtgccatcaaattggatgacaaagatccaaatttcaaagatcaagtcattttgctgaataagcatattgacgcatacaaaacattcccaccaacagagcctaaaaaggacaaaaagaagaaggctgatgaaactcaagccttaccgcagagacagaagaaacagcaaactgtgactcttcttcctgctgcagatttggatgatttctccaaacaattgcaacaatccatgagcagtgctgactcaactcaggcctaa

SEQ ID NO: 2 - protein, 420 aa, Artificial Sequence
  Synthetic_Nucleocapsid_Protein_Sars-CoV2
MVSDNGPQNQRNAPRITFGGPSDSTGSNQNGERSGARSKQRRPQGLPNNTASWFTALTQHGKEDLKFPRGQGVPINTNSSPDDQIGYYRRATRRIRGGDGKMKDLSPRWYFYYLGTGPEAGLPYGANKDGIIWVATEGALNTPKDHIGTRNPANNAAIVLQLPQGTTLPKGFYAEGSRGGSQASSRSSSRSRNSSRNSTPGSSRGTSPARMAGNGGDAALALLLLDRLNQLESKMSGKGQQQQGQTVTKKSAAEASKKPRQKRTATKAYNVTQAFGRRGPEQTQGNFGDQELIRQGTDYKHWPQIAQFAPSASAFFGMSRIGMEVTPSGTWLTYTGAIKLDDKDPNFKDQVILLNKHIDAYKTFPPTEPKKDKKKKADETQALPQRQKKQQTVTLLPAADLDDFSKQLQQSMSSADSTQA

SEQ ID NO: 3 - DNA, 1368 bp, Artificial Sequence
  COVAX191_N
atggtgtcttttgttcctgggcaagaaaatgccggtggcagaagctcctctgtaaaccgcgctggtaatggaatcctcaagaaaaccacttgggctgaccaaaccgagcgtggaccaaataatcaaaatagaggcagaaggaatcagccaaagcagactgcaactactcaacccaactccgggagtgtggttccccattactcctggttttctggcattacccagttccaaaagggaaaggagtttcagtttgcagaaggacaaggagtgcctattgccaatggaatccccgcttcagagcaaaagggatattggtatagacacaaccgccgttcttttaaaacacctgatgggcagcagaagcaattactgcccagatggtatttttactatcttggcacagggccccatgctggagccagttatggagacagcattgaaggcgtcttttgggttgcaaacagccaagcggacaccaatacccgctctgatattgtcgaaagggacccaagcagtcatgaggctattcctactaggtttgcgcccggcacggtattgcctcagggcttttatgttgaaggctctggaaggtctgccccggccagccgatctggttcgcggtcacaatcccgtgggccaaataatcgcgctagaagcagttccaaccagcgccagcctgcctctactgtaaaacctgatatggccgaagaaattgctgctcttgttttggctaagctcggtaaagatgccggccagcccaagcaagtaacgaagcaaagtgccaaagaagtcaggcagaaaattttaaacaagcctcgccaaaagaggactccaaacaagcagtgcccagtgcagcagtgttttggaaagagaggccccaatcagaattttggaggctctgaaatgttaaaacttggaactagtgatccacagttccccattcttgcagagttggctccaacagttggtgccttcttctttggatctaaattagaattggtcaaaaagaattctggtggtgctgatgaacccaccaaagatgtgtatgagctgcaatattcaggtgcagttagatttgatagtactctacctggttttgagactatcatgaaagtgttgaatgagaatttgaatgcctaccagaaggatggtggtgcagatgtggtgagcccaaagccccaaagaaaagggcgtagacaggctcaggaaaagaaagatgaagtagataatgtaagcgttgcaaagcccaaaagctctgtgcagcgaaatgtaagtagagaattaaccccagaggatagaagtctgttggctcagatccttgatgatggcgtagtgccagatgggttagaagatgactctaatgtgtaa

SEQ ID NO: 4 - protein, 455 aa, Artificial Sequence
  Synthetic_Nucleocapsid_Protein_MHV
MVSFVPGQENAGGRSSSVNRAGNGILKKTTWADQTERGPNNQNRGRRNQPKQTATTQPNSGSVVPHYSWFSGITQFQKGKEFQFAEGQGVPIANGIPASEQKGYWYRHNRRSFKTPDGQQKQLLPRWYFYYLGTGPHAGASYGDSIEGVFWVANSQADTNTRSDIVERDPSSHEAIPTRFAPGTVLPQGFYVEGSGRSAPASRSGSRSQSRGPNNRARSSSNQRQPASTVKPDMAEEIAALVLAKLGKDAGQPKQVTKQSAKEVRQKILNKPRQKRTPNKQCPVQQCFGKRGPNQNFGGSEMLKLGTSDPQFPILAELAPTVGAFFFGSKLELVKKNSGGADEPTKDVYELQYSGAVRFDSTLPGFETIMKVLNENLNAYQKDGGADVVSPKPQRKGRRQAQEKKDEVDNVSVAKPKSSVQRNVSRELTPEDRSLLAQILDDGVVPDGLEDDSNV

SEQ ID NO: 5 - DNA, 231 bp, Artificial Sequence
  COVAX192_E
atggtgtactcattcgtttcggaagagacaggtacgttaatagttaatagcgtacttctttttcttgctttcgtggtattcttgctagttacactagccattcttactgcgcttcgattgtgtgcgtactgttgcaatattgttaacgtgagtcttgtaaaaccttctttttacgtttactctcgtgttaaaaatctgaattcttctcgggttcctgatcttctggtctaa

SEQ ID NO: 6 - protein, 76 aa, Artificial Sequence
  Synthetic_Envelope_Protein_Sars-CoV2
MVYSFVSEETGTLIVNSVLLFLAFVVFLLVTLAILTALRLCAYCCNIVNVSLVKPSFYVYSRVKNLNSSRVPDLLV

SEQ ID NO: 7 - DNA, 255 bp, Artificial Sequence
  COVAX191_E
atggtgtttaatttattccttacagacacagtatggtatgtggggcagattatttttatattcgcagtgtgtttgatggtcaccataattgtggttgccttccttgcgtctatcaaactttgtattcaactttgcggtttatgtaatactttggtgctgtccccttctatttatttgtatgataggagtaagcagctttataagtactataatgaagaaatgagactgcccctattagaggtggatgatatctaa

SEQ ID NO: 8 - protein, 84 aa, Artificial Sequence
  Synthetic_Envelope_Protein_MHV
MVFNLFLTDTVWYVGQIIFIFAVCLMVTIIVVAFLASIKLCIQLCGLCNTLVLSPSIYLYDRSKQLYKYYNEEMRLPLLEVDDI

SEQ ID NO: 9 - DNA, 672 bp, Artificial Sequence
  COVAX192_M
atggtggcagattccaacggtactattaccgttgaggagctgaaaaagctccttgaacaatggaacctagtaataggtttcctattccttacatggatttgcctgctgcaatttgcctatgccaacaggaataggtttttgtacatcattaagttgattttcctctggctgttatggccagtaactttagcttgttttgtgcttgctgctgtttacagaataaattggatcaccggtggaattgctattgcaatggcttgtcttgtaggattgatgtggctaagctacttcattgcttctttcagactgtttgcgcgtacgcgttccatgtggtcattcaatccagaaactaacattcttctcaacgtgccactccatggaactattctgactagaccgcttctagaaagtgaactcgtaatcggagctgttatccttcgtggacatcttcgtattgctggacatcatctaggacgctgtgacatcaaggatctacctaaagaaatcactgttgctacatcacgaacgctttcttattacaaattgggagcttcacagcgtgtagcaggtgattcaggttttgctgcatatagtcgctacaggattggcaactataaattaaacacagaccattccagtagcagtgacaatattgctttgcttgtacagtaa

SEQ ID NO: 10 - protein, 223 aa, Artificial Sequence
  Synthetic_Membrane_Protein_Sars-CoV2
MVADSNGTITVEELKKLLEQWNLVIGFLFLTWICLLQFAYANRNRFLYIIKLIFLWLLWPVTLACFVLAAVYRINWITGGIAIAMACLVGLMWLSYFIASFRLFARTRSMWSFNPETNILLNVPLHGTILTRPLLESELVIGAVILRGHLRIAGHHLGRCDIKDLPKEITVATSRTLSYYKLGASQRVAGDSGFAAYSRYRIGNYKLNTDHSSSSDNIALLVQ

SEQ ID NO: 11 - DNA, 690 bp, Artificial Sequence
  COVAX191_M
atggtgagtagtactactcaggccccagagcccgtctatcaatggaccgccgacgaggcagttcaattccttaaggaatggaacttctcgttgggcattatactactctttattactatcatactacagttcggttacacgagccgtagcatgtttatttatgttgtgaaaatgataatcttgtggttaatgtggccactgactattgttttgtgtattttcaattgcgtgtatgcgctaaataatgtgtatcttggattttctatagtgtttactatagtgtccattgtaatctggatcatgtattttgtgaacagcataaggttgtttatcaggactggtagctggtggagcttcaaccccgaaacaaacaaccttatgtgtatagatatgaaaggtaccgtgtatgttagacccattattgaggattaccatacactaacagccactattattcgtggccacctctacatgcaaggtgttaagctaggcaccggtttctctttgtctgacttgcccgcttatgttacagttgctaaggtgtcacacctttgcacttataagcgcgcattcttagacaaggtagacggtgttagcggttttgctgtttatgtgaagtccaaggtcggaaattaccgactgccctcaaacaaaccgagtggcgcggacaccgcattgttgagaacctaa

SEQ ID NO: 12 - protein, 229 aa, Artificial Sequence
  Synthetic_Membrane_Protein_MHV
MVSSTTQAPEPVYQWTADEAVQFLKEWNFSLGIILLFITIILQFGYTSRSMFIYVVKMIILWLMWPLTIVLCIFNCVYALNNVYLGFSIVFTIVSIVIWIMYFVNSIRLFIRTGSWWSFNPETNNLMCIDMKGTVYVRPIIEDYHTLTATIIRGHLYMQGVKLGTGFSLSDLPAYVTVAKVSHLCTYKRAFLDKVDGVSGFAVYVKSKVGNYRLPSNKPSGADTALLRT

SEQ ID NO: 13 - DNA, 3885 bp, Artificial Sequence
  SARS-CoV-2 S
atggtgtttgtttttcttgttttattgccactagtctctagtcagtgtgttaatcttacaatggtgtttgtttttcttgttttattgccactagtctctagtcagtgtgttaatcttacaaccagaactcaattaccccctgcatacactaattctttcacacgtggtgtttattaccctgacaaagttttcagatcctcagttttacattcaactcaggacttgttcttacctttcttttccaatgttacttggttccatgctatacatgtctctgggaccaatggtactaagaggtttgataaccctgtcctaccatttaatgatggtgtttactttgcttccactgagaagtctaacataataagaggctggatttttggtactactttagattcgaaaacccagtccctacttattgttaataacgctactaatgttgttatcaaagtctgtgaatttcaattttgtaacgatccatttttgggtgtttattaccacaaaaacaacaaaagttggatggaaagtgagttcagagtttattctagtgcgaataattgcacttttgaatacgtctctcagccttttcttatggaccttgaaggaaaacagggtaatttcaaaaatcttagggaatttgtgttcaagaatattgatggttacttcaagatatactctaagcacacgcctattaatttagtgcgtgatctccctcagggtttttcggctttagaaccattggtagatttgccaataggtattaacatcactaggtttcaaactttacttgctttacatagaagttatttaactcctggtgattcttcttcaggttggacagctggtgctgcagcttattatgtgggttatcttcaacctaggacttttctactgaagtacaatgaaaatggaaccattacagatgctgtagactgtgcacttgaccctctctcagaaacaaagtgtacgttgaaatccttcactgtagaaaaaggaatctatcaaacttctaactttagagtccaaccaacagaatctattgttagatttcctaacatcacaaacttgtgcccttttggtgaagtttttaacgccaccagatttgcatctgtttatgcttggaacaggaagagaatcagcaactgtgttgctgattattctgtcctgtataattccgcatcattttccacttttaagtgttatggagtgtctcctactaaattaaatgatctctgctttactaatgtctatgcagattcatttgtaattagaggtgatgaagtcagacaaatcgctccagggcaaactggaaagattgctgattataactacaaattaccagatgattttacaggctgcgttatagcttggaattctaacaatcttgattctaaggttggtggtaattataattacctgtacagattgtttaggaagtctaatctcaaaccttttgagagagatatttcaactgaaatctatcaggccggtagcacaccttgtaatggtgttgaaggttttaattgttactttcctctgcaatcatatggtttccaacccactaatggtgttggttaccaaccatacagagtagtagtactttcttttgaacttctacatgcaccagcaactgtttgtggacctaaaaagtctactaatttggttaagaacaagtgtgtcaatttcaacttcaatggtttaacaggcacaggtgttcttactgagtctaacaaaaagtttctgcctttccaacaatttggcagagacattgctgacactactgatgctgttcgtgatccacaaacacttgagattcttgacattacaccatgttcttttggtggtgtcagtgttataacaccaggaacaaatacttctaaccaggttgctgttctttatcaggatgttaactgcacagaagtccctgttgctattcatgcagatcaacttactcctacttggcgtgtttattctacaggttctaatgtttttcaaacacgtgcaggctgtttaataggggctgaacatgtcaacaactcatatgagtgtgacatacccattggtgcaggtatatgcgctagttatcagactcagactaattctcctcggagagcaagaagtgtagctagtcaatccatcattgcctacactatgtcacttggtgcagaaaattcagttgcttactctaataactctattgccatacccacaaattttactattagcgttaccacagaaattctaccagtgtctatgaccaagacatcagtagattgtacaatgtacatttgtggtgattcaactgaatgcagcaatcttttgttgcaatatggcagtttttgtacacaattaaaccgtgctttaactggaatagctgttgaacaagacaaaaacacccaagaagtttttgcacaagtcaaacaaatttacaagacaccaccaattaaagattttggcggttttaattttagccagatactgccagatccatcaaaaccaagcaagaggtcatttattgaagatctactgttcaacaaagtgacacttgcagatgctggcttcatcaaacaatatggtgattgccttggtgatattgctgctagagacctcatttgtgcacaaaagtttaacggccttactgttttgccacctttgctcacagatgaaatgattgctcaatacacttctgcactgttagcaggtacaatcacttctggttggacttttggtgcaggtgctgcattacaaataccatttgctatgcaaatggcttataggtttaatggtattggagttacacagaatgttctctatgagaaccaaaaattgattgccaaccaatttaatagtgctattggcaaaattcaagactcactttcttccacagcaagtgcacttggaaaacttcaagatgtggtcaaccaaaatgcacaagctttaaacacgcttgttaaacaacttagctccaattttggtgcaatttcaagtgttttaaacgacatcctttcacgtcttgacaaagttgaggctgaagtgcaaattgataggttgatcacaggcagacttcaaagtttgcagacatatgtgactcaacaattaattagagctgcagaaatcagagcttctgctaatcttgctgctactaaaatgtcagagtgtgtacttggacaatcaaaaagagttgacttttgcggaaagggctatcatcttatgtcatttcctcagtcagcacctcatggtgtcgtctttttgcatgtgacttatgtccctgcacaagaaaagaacttcacaactgctcctgccatttgtcatgatggaaaagcacactttcctcgtgaaggtgtctttgtttcaaatggcacacactggtttgtaacacaaaggaatttttatgaaccacaaatcattactacagacaacacatttgtgtctggtaactgtgatgttgtaataggaattgtcaacaacacagtttatgatcctttgcaacctgaattagactcattcaaggaggagcttgataaatacttcaagaaccatacctcaccagatgttgatttaggtgacatctctggcattaatgcttcagttgtaaacattcagaaagaaatcgaccgcctcaatgaggttgccaagaatttaaatgaatctctcatcgatctccaagaacttggaaagtatgagcagtatataaaatggccatggtacatttggctaggttttatagctggcttgattgccatagtaatggtgacaattatgctttgctgtatgaccagttgctgtagttgtctcaagggctgttgttcttgtggatcctgctgcaaatttgacgaggacgactctgagccagtgctcaaaggagtcaaattacattacacataa

SEQ ID NO: 14 - protein, 1274 aa, Artificial Sequence
  Synthetic_Spike_Protein_Sars-CoV2
MVFVFLVLLPLVSSQCVNLTTRTQLPPAYTNSFTRGVYYPDKVFRSSVLHSTQDLFLPFFSNVTWFHAIHVSGTNGTKRFDNPVLPFNDGVYFASTEKSNIIRGWIFGTTLDSKTQSLLIVNNATNVVIKVCEFQFCNDPFLGVYYHKNNKSWMESEFRVYSSANNCTFEYVSQPFLMDLEGKQGNFKNLREFVFKNIDGYFKIYSKHTPINLVRDLPQGFSALEPLVDLPIGINITRFQTLLALHRSYLTPGDSSSGWTAGAAAYYVGYLQPRTFLLKYNENGTITDAVDCALDPLSETKCTLKSFTVEKGIYQTSNFRVQPTESIVRFPNITNLCPFGEVFNATRFASVYAWNRKRISNCVADYSVLYNSASFSTFKCYGVSPTKLNDLCFTNVYADSFVIRGDEVRQIAPGQTGKIADYNYKLPDDFTGCVIAWNSNNLDSKVGGNYNYLYRLFRKSNLKPFERDISTEIYQAGSTPCNGVEGFNCYFPLQSYGFQPTNGVGYQPYRVVVLSFELLHAPATVCGPKKSTNLVKNKCVNFNFNGLTGTGVLTESNKKFLPFQQFGRDIADTTDAVRDPQTLEILDITPCSFGGVSVITPGTNTSNQVAVLYQDVNCTEVPVAIHADQLTPTWRVYSTGSNVFQTRAGCLIGAEHVNNSYECDIPIGAGICASYQTQTNSPRRARSVASQSIIAYTMSLGAENSVAYSNNSIAIPTNFTISVTTEILPVSMTKTSVDCTMYICGDSTECSNLLLQYGSFCTQLNRALTGIAVEQDKNTQEVFAQVKQIYKTPPIKDFGGFNFSQILPDPSKPSKRSFIEDLLFNKVTLADAGFIKQYGDCLGDIAARDLICAQKFNGLTVLPPLLTDEMIAQYTSALLAGTITSGWTFGAGAALQIPFAMQMAYRFNGIGVTQNVLYENQKLIANQFNSAIGKIQDSLSSTASALGKLQDVVNQNAQALNTLVKQLSSNFGAISSVLNDILSRLDKVEAEVQIDRLITGRLQSLQTYVTQQLIRAAEIRASANLAATKMSECVLGQSKRVDFCGKGYHLMSFPQSAPHGVVFLHVTYVPAQEKNFTTAPAICHDGKAHFPREGVFVSNGTHWFVTQRNFYEPQIITTDNTFVSGNCDVVIGIVNNTVYDPLQPELDSFKEELDKYFKNHTSPDVDLGDISGINASVVNIQKEIDRLNEVAKNLNESLIDLQELGKYEQYIKWPWYIWLGFIAGLIAIVMVTIMLCCMTSCCSCLKGCCSCGSCCKFDEDDSEPVLKGVKLHYT

SEQ ID NO: 15 - DNA, 21746 bp, Artificial Sequence
  COVAX_Syn_RepA56
gtataagagtgattggcgtccgtacgtaccctctcaactctaaaactcttgtagtttaaatctaatctaaactttataaacggcacttcctgcgtgtccatgcccgcgggcctggtcttgtcatagtgctgacatttgtagttccttgactttcgttctctgccagtgacgtgtccattcggcgccagcagcccacccataggttgcataatggcaaagatgggcaaatacggcctgggcttcaaatgggccccagaatttccatggatgcttccgaacgcatcggagaagttgggtaaccctgagaggtcagaggaggatgggttttgcccctctgctgcgcaagaaccgaaagttaaaggaaaaactttggttaatcacgtgagggtgaattgtagccggcttccagctttggaatgctgtgttcagtctgccataatccgtgatatttttgtagatgaggatccccagaaggtggaggcctcaactatgatggcattgcagttcggtagtgccgtcttggttaagccatccaagcgcttgtctattcaggcatggactaatttgggtgtgcttcccaaaacagctgccatggggttgttcaagcgcgtctgcctgtgtaacaccagggagtgctcttgtgacgcccacgtggcctttcacctttttacggtccaacccgatggtgtatgcctgggtaatggccgttttataggctggttcgttccagtcacagccataccggagtatgcgaagcagtggttgcaaccctggtccatccttcttcgtaagggtggtaacaaagggtctgtgacatccggccacttccgccgcgctgttaccatgcctgtgtatgactttaatgtagaggatgcttgtgaggaggttcatcttaacccgaagggtaagtactcctgcaaggcgtatgccctgctgaagggctatcgcggtgttaagcccatcctgtttgtggaccagtatggttgcgactatactggatgtctcgccaagggtcttgaggactatggcgatctcaccttgagtgagatgaaggagttgttccctgtgtggcgtgactccttggatagtgaagtccttgtggcttggcacgttgatcgagatcctcgggctgctatgcgtctgcagactcttgctactgtacgttgcattgattatgtgggccaaccgaccgaggatgtggtggatggagatgtggtagtgcgtgagcctgctcatcttctcgcagccaatgccattgttaaaagactcccccgtttggtggagactatgctgtatacggattcgtccgttacagaattctgttataaaaccaagctgtgtgaatgcggttttatcacgcagtttggctatgtggattgttgtggtgacacctgtgattttcgtgggtgggttgccggcaatatgatggatggctttccatgtccagggtgtaccaaaaattatatgccctgggaattggaggcccagtcatcaggtgttataccagaaggaggtgttctattcactcagagcactgatacagtgaatcgtgagtcctttaagctctacggtcatgctgttgtgccttttggttctgctgtgtattggagcccttgcccaggtatgtggcttccagtaatttggtcgtcggttaagtcatactctggtttgacttatacaggagtagttggttgtaaggcaattgttcaagagacagacgctatatgtcgttctctgtatatggattatgtccagcacaagtgtggcaatctcgagcagagagctatccttggattggacgatgtctatcatagacagttgcttgtgaataggggtgactatagtctcctccttgagaatgtggatttgtttgttaagcggcgcgctgaatttgcttgcaaattcgccacctgtggagatggtcttgtacccctcctactagatggtttagtgccccgcagttattatttgattaagagtggtcaagctttcacctctatgatggttaattttagccatgaggtgactgacatgtgtatggacatggctttattgttcatgcatgatgttaaagtggccactaagtatgttaagaaggttactggcaaactggccgtgcgctttaaagcgttgggtgtagccgttgtcagaaaaattactgaatggtttgatttagccgtggacattgctgctagtgccgctggatggctttgctaccagctggtaaatggcttatttgcagtggccaatggtgttataacctttgtacaggaggtgcctgagcttgtcaagaattttgttgacaagttcaaggcatttttcaaggttttgatcgactctatgtcggtttctatcttgtctggacttactgttgtcaagactgcctcaaatagggtgtgtcttgctggcagtaaggtttatgaagttgtgcagaaatctttgtctgcatatgttatgcctgtgggttgcagcgaagccacttgtttggtgggtgagattgaacctgcagtttttgaagatgatgttgttgatgtggttaaagccccattaacatatcaaggctgttgtaagccacccacttctttcgagaagatttgtattgtggataaattgtatatggccaagtgtggtgatcaattttaccctgtggttgttgataacgacactgttggcgtgttagatcagtgctggaggtttccctgtgcgggcaagaaagtcgagtttaacgacaagcccaaagtcaggaagataccctccacccgtaagattaagatcaccttcgcactggatgcgacctttgatagtgttctttcgaaggcgtgttcagagtttgaagttgataaagatgttacattggatgagctgcttgatgttgtgcttgacgcagttgagagtacgctcagcccttgtaaggagcatgatgtgataggcacaaaagtttgtgctttacttgataggttggcaggagattatgtctatctttttgatgagggaggcgatgaagtgatcgccccgaggatgtattgttccttttctgctcctgatgacgaggactgcgttgcagcggatgttgtagatgcagatgaaaaccaagatgatgatgccgaggactcagcagtccttgtcgctgatacccaagaagaggacggcgttgccaaggggcaggttgaggcggattcggaaatttgcgttgcgcatactggtagtcaagaagaattggctgagcctgatgctgtcggatctcaaactcccatcgcctctgctgaggaaaccgaagtcggagaggcaagcgacagggaagggattgctgaggcgaaggcaactgtgtgtgctgatgctgtagatgcctgccccgatcaagtggaggcatttgaaattgaaaaggtcgaggactctatcttggatgagcttcaaactgaacttaatgcgccagcggacaagacctatgaggatgtcttggcattcgatgccgtatgctcagaggcgttgtctgcattctatgctgtgccgagtgatgagacgcactttaaagtgtgtggattctattcgcctgctatagagcgcactaattgttggctgcgttctactttgatagtaatgcagagtctacctttggaatttaaagacttggagatgcaaaagctctggttgtcttacaaggccggctatgaccaatgctttgtggacaaactagttaagagcgtgcccaagtctattatccttccacaaggtggttatgtggcagattttgcctatttctttctaagccagtgtagctttaaagcttatgctaactggcgttgtttagagtgtgacatggagttaaagcttcaaggcttggacgccatgtttttctatggggacgttgtgtctcatatgtgcaagtgtggtaatagcatgaccttgttgtctgcagatataccctacactttgcattttggagtgcgagatgataagttttgcgctttttacacgccaagaaaggtctttagggctgcttgtgcggtagatgttaatgattgtcactctatggctgtagtagagggcaagcaaattgatggtaaagtggttaccaaatttattggtgacaaatttgattttatggtgggttacgggatgacatttagtatgtctccttttgaactcgcccagttatatggttcatgtataacaccaaatgtttgttttgttaaaggagatgttataaaggttgttcgcttagttaatgctgaagtcattgttaaccctgctaatgggcgtatggctcatggtgccggcgtcgccggcgccatagctgaaaaggcgggcagtgcttttattaaagaaacctccgatatggtgaaggctcagggcgtttgccaggttggtgaatgctatgaatctgccggtggtaagttatgtaaaaaggtgcttaacattgtagggccagatgcgcgagggcatggcaagcaatgctattcacttttagagcgtgcttatcagcatattaataagtgtgacaatgttgtcactactttaatttcggctggtatatttagtgtgcctactgatgtctccctaacttacttacttggtgtagtgacaaagaatgtcattcttgtcagtaacaaccaggatgattttgatgtgatagagaagtgtcaggtgacctccgttgctggtaccaaagcgctatcacttcaattggccaaaaatttgtgccgtgatgtaaagtttgtgacgaatgcatgtagttcgctttttagtgaatcttgctttgtctcaagctatgatgtgttgcaggaagttgaagcgctgcgacatgatatacaattggatgatgatgctcgtgtctttgtgcaggctaatatggactgtctgcccacagactggcgtctcgttaacaaatttgatagtgttgatggtgttagaaccattaagtattttgaatgcccgggcgggatttttgtatccagccagggcaaaaagtttggttatgttcagaatggttcatttaaggaggcgagtgttagccaaataagggctttactcgctaataaggttgatgtcttgtgtactgttgatggtgttaacttccgctcctgctgcgtagcagagggtgaagtttttggcaagacattaggttcagtcttttgtgatggcataaatgtcaccaaagttaggtgtagtgccatttacaagggtaaggttttctttcagtacagtgatttgtccgaggcagatcttgtggctgttaaagatgcctttggttttgatgaaccacaactgctgaagtactacactatgcttggcatgtgtaagtggccagtagttgtttgtggcaattattttgctttcaagcagtcaaataataattgctacatcaacgtggcatgtttaatgctgcaacacttgagtttaaagtttcctaagtggcaatggcaagaggcttggaacgagttccgctctggtaaaccactaaggtttgtgtccttggtattagcaaagggcagctttaaatttaatgaaccttctgattctatcgattttatgcgtgtggtgctacgtgaagcagatttgagtggtgccacgtgcaatttggaatttgtttgtaaatgtggtgtgaagcaagagcagcgcaaaggtgttgacgctgttatgcattttggtacgttggataaaggtgatcttgtcaggggttataatatcgcatgtacgtgcggtagtaaacttgtgcattgcacccaatttaacgtaccatttttaatttgctccaacacaccagagggtaggaaactgcccgacgatgttgttgcagctaatatttttactggtggtagtgtgggccattacacgcatgtgaaatgtaaacccaagtaccagctttatgatgcttgtaatgttaataaggtttcggaggctaagggtaattttaccgattgcctctaccttaaaaatttaaagcaaaccttctcgtctgtgctgacgactttttatttagatgacgtaaagtgtgtggagtataagccagatttatcgcagtattactgtgagtctggtaaatattatacaaaacccattattaaggcccaatttagaacatttgagaaggttgatggtgtctataccaactttaaattggtgggacatagtattgctgaaaaactcaatgctaagctgggatttgattgtaattctccctttgtggagtataaaattacagagtggccaacagctactggagatgtggtgttggctagtgatgatttgtatgtaagtcggtacttaagcgggtgcattacttttggtaaaccggttgtctggcttggccatgaggaagcatcgctgaaatctctcacatattttaatagacctagtgtcgtttgtgaaaataaatttaacgtgttgcccgttgatgtcagtgaacccacggacaaggggcctgtgcctgctgcagtccttgttaccggcgtccctggagctgatgcgtcagctggtgccggtattgccaaggagcaaaaagcctgtgcttctgctagtgtggaggatcaggttgttacggaggttcgtcaagagccatctgtttcagctgctgatgtcaaagaggttaaattgaatggtgttaaaaagcctgttaaggtggaaggtagtgtggttgttaatgatcccactagcgaaaccaaagttgttaaaagtttgtctattgttgatgtctatgatatgttcctgacagggtgtaagtatgtggtttggactgctaatgagttgtctcgactagtaaattcaccgactgttagggagtatgtgaagtggggtatgggaaagattgtaacacccgctaagttgttgttgttaagagatgagaagcaagagttcgtagcgccaaaagtagtcaaggcgaaagctattgcctgctattgtgctgtgaagtggtttctcctctattgttttagttggataaagtttaatactgacaataaggttatatacaccacagaagtagcttcaaagcttactttcaagttgtgctgtttggcctttaagaatgccttacagacgtttaattggagcgttgtgtctaggggctttttcctagttgcaacggtctttttactctggtttaactttttgtatgctaatgttattttgagtgacttctatttgcctaatattgggcctctccctacgtttgtgggacagatagttgcgtggtttaagactacatttggtgtgtcaaccatctgtgatttctaccaggtgacggatttgggctatagaagttcgttttgtaatggaagtatggtatgtgaactatgcttctcaggttttgatatgctggacaactatgatgctataaatgttgttcaacacgttgtagataggcgtttgtcctttgactatattagcctatttaaactggtagttgagcttgtaatcggctactctctttatactgtgtgcttctacccactgtttgtccttattggaatgcagttattgaccacatggttgcctgaattctttatgctggagactatgcattggagtgctcgtttgtttgtgtttgttgccaatatgcttccagcttttacgttactgcgattttacatcgtggtgacagctatgtataaggtctattgtctttgtagacatgttatgtatggatgtagtaagcctggttgcttgttttgttataagagaaaccgtagtgtccgtgttaagtgtagcaccgttgttggtggttcactacgctattacgatgtaatggctaacggcggcacaggtttctgtacaaagcaccagtggaactgtcttaattgcaattcctggaaaccaggcaatacattcataactcatgaagcagcggcggacctctctaaggagttgaaacgccctgtgaatccaacagattctgcttattactcggtcacagaggttaagcaggttggttgttccatgcgtttgttctacgagagagatggacagcgtgtttatgatgatgttaatgctagtttgtttgtggacatgaatggtctgctgcattctaaagttaaaggtgtgcctgaaacgcatgttgtggttgttgagaatgaagctgataaagctggttttctcggcgccgcagtgttttatgcacaatcgctctacagacctatgttgatggtggaaaagaaattaataactaccgccaacactggtttgtctgttagtcgaactatgtttgacctttatgtagattcattgctgaacgtcctcgacgtggatcgcaagagtctaacaagttttgtaaatgctgcgcacaactctctaaaggagggtgttcagcttgaacaagttatggatacctttattggctgtgcccgacgtaagtgtgctatagattctgatgttgaaaccaagtctattaccaagtccgtcatgtcggcagtaaatgctggcgttgattttacggatgagagttgtaataacttggtgcctacctatgttaaaagtgacactatcgttgcagccgatttgggtgttcttattcagaataatgctaagcatgtacaggctaatgttgctaaagccgctaatgtggcttgcatttggtctgtggatgcttttaaccagctatctgctgacttacagcataggctgcgaaaagcatgttcaaaaactggcttgaagattaagcttacttataataagcaggaggcaaatgttcctattttaactacaccgttctctcttaaagggggcgctgtttttagtagaatgttacaatggttgtttgttgctaatttgatttgtttcattgtgttgtgggcccttatgccaacatatgcagtgcacaaatcggatatgcagttgcctttatatgccagttttaaagttatagataacggtgtgctaagggatgtgtctgttactgacgcatgcttcgcaaacaaatttaatcaattcgaccaatggtatgagtctacttttggtcttgcttattaccgcaactctaaggcttgtcctgttgtggttgctgtaatagatcaagacattggccataccttatttaatgttcctaccacagttttaagatatggatttcatgtgttgcattttataacccatgcatttgctactgatagcgtgcagtgttacacgccacatatgcaaatcccctatgataatttctatgctagtggttgcgtgttgtcatccctctgtactatgcttgcgcatgcagatggaaccccgcatccttattgttatacagggggtgttatgcataatgcctctctgtatagttctttggctcctcatgtccgttataacctggctagttcaaatggttatatacgttttcccgaagtggttagtgaaggcattgtgcgtgttgtgcgcactcgctctatgacctactgcagggttggtttatgtgaggaggccgaggagggtatctgctttaattttaatcgttcatgggtattgaacaacccgtattatagggccatgcctggaactttttgtggtaggaatgcttttgatttaatacatcaagttttaggaggattagtgcggcctattgatttctttgccttaacggcgagttcagtggctggtgctatccttgcaattattgtcgttttggctttctattatttaatcaagcttaagcgtgcctttggtgactacactagtgttgtggttatcaatgtaattgtgtggtgtataaattttctgatgctttttgtgtttcaggtttatcccacattgtcttgtttatatgcttgtttctacttctacaccacgctttatttcccttcggagataagtgttgttatgcatttgcaatggcttgtcatgtatggtgctattatgcccttgtggttttgcattatttacgtggcagtcgttgtttcaaaccatgcattgtggttgttctcttactgccgcaaaattggtaccgaggttcgtagtgacggcacatttgaggaaatggcccttactacctttatgattactaaagaatcttattgtaagttgaaaaactctgtttctgatgttgcttttaacaggtacttgagtctttacaacaagtaccgttacttcagtggcaaaatggatactgccgcttatagagaggctgcctgttcacaactggcaaaggcaatggaaacatttaaccataataatggtaatgatgttctctatcagcctccaaccgcctctgttactacatcatttttacagtctggtatagtgaagatggtgtcgcccacctctaaagtggagccttgtattgttagtgttacttatggtaacatgacacttaatgggttgtggttggatgataaagtttattgcccaagacatgttatctgttcttcagctgacatgacagaccctgattatcctaatttgctttgtagagtgacatcaagtgatttttgtgttatgtctggtcgtatgagccttactgtaatgtcttatcaaatgcagggctgccaacttgttttgactgttacactgcaaaatcctaacacgcctaagtattccttcggtgttgttaagcctggtgagacatttactgtactggctgcatacaatggcagacctcaaggagccttccatgttacgcttcgtagtagccataccataaagggctcctttctatgtggatcctgcggttctgtaggatatgttttaactggcgatagtgtacgatttgtttatatgcatcagctagagttgagtactggttgtcataccggtactgactttagtgggaacttttatggtccctatagagatgcgcaagttgtacaattgcctgttcaggattatacgcagactgttaatgttgtagcttggctttatgctgctatttttaacagatgcaactggtttgtgcaaagtgatagttgttccctggaggagtttaatgtttgggctatgaccaatggttttagctcaatcaaagccgatcttgtcttggatgcgcttgcttctatgacaggcgttacagttgaacaggtgttggccgctattaagaggctgcattctggattccagggcaaacaaattttaggtagttgtgtgcttgaagatgagctgacaccaagtgatgtttatcaacaactagctggtgtcaagctacagtcaaagcgcacaagagttataaaaggtacatgttgctggatattggcttcaacgtttttgttctgtagcattatctcagcatttgtaaaatggactatgtttatgtatgttactacccatatgttgggagtgacattgtgtgcactttgttttgtaagctttgctatgttgttgatcaagcataagcatttgtatttaactatgtacatcatgcctgtgttatgcacactgttttacaccaactatttggttgtgtacaaacagagttttagaggtctagcttatgcttggctttcacactttgtccctgctgtagattatacatatatggatgaagttttatatggtgttgtgttgctagtagctatggtgtttgttaccatgcgtagcataaaccacgacgtcttttctattatgttcttggttggtagacttgtcagcctggtatccatgtggtattttggagccaatttagaggaagaggtactattgttcctcacatccctatttggcacgtacacatggactactatgttgtcattggctaccgctaaggttattgctaaatggttggctgtgaatgtcttgtacttcacagacgtaccgcaaattaaattagttctgttgagctacttgtgtattggttatgtgtgttgttgttattggggaatcttgtcactccttaatagcatttttaggatgccattgggcgtctacaattataaaatctccgttcaggagttacgttatatgaatgctaatggcttgcgcccacctagaaatagttttgaggccctgatgcttaattttaagctgttgggaattggtggtgtgccagtcattgaagtatctcaaattcaatcaagattgacggatgttaaatgtgctaatgttgtgttgcttaattgcctccagcacttgcatattgcatctaattctaagttgtggcagtattgtagtactttgcacaatgaaatactggctacatctgatttgagcgtggccttcgataagttggctcaactcttagttgttttatttgctaatccagcagcagtggatagcaagtgccttgcaagtattgaagaagtgagcgatgattacgttcgcgacaatactgtcttgcaagccttacagagtgaatttgttaatatggctagcttcgttgagtatgaacttgctaagaagaatctagatgaggctaaggctagcggctctgccaatcaacagcagattaagcagctagagaaggcgtgtaatattgctaagtcagcatatgagcgcgacagagctgttgctcgtaagctggaacgtatggctgatttagctcttacaaacatgtataaagaagctagaattaatgataagaagagtaaggtagtgtctgcattgcaaaccatgctctttagtatggtgcgtaagctagataaccaagctcttaattctattttagacaacgcagttaagggttgtgtacctttgaatgcaataccatcattgacttcgaacactctgactataatagtgccagataagcaggtttttgatcaggttgtggataatgtgtatgtcacctatgctgggaatgtatggcatatacagtttattcaagatgctgatggtgctgttaaacaattgaatgagatagatgttaattcaacctggcctctagtcattgctgcaaataggcataatgaagtgtctactgttgttttgcagaacaatgagttgatgcctcagaagttgagaactcaggttgtcaatagtggctcagatatgaattgtaatactcctacccagtgttactataatactactggcacgggtaagattgtgtatgctatacttagtgactgtgacggcctgaagtacactaagatagtaaaagaagatggaaattgtgttgttttggaattggatcctccctgtaagttttctgttcaggatgtgaagggccttaaaattaagtacctttactttgtgaaggggtgtaatacactggctagaggctgggttgtaggcaccttatcctcgacagtgagattgcaggcgggtacggcaactgagtatgcctccaactctgcaatactgtcgctgtgtgcgttttctgtagatcctaagaaaacgtacttggattatataaaacagggtggagttcccgttactaattgtgttaagatgttatgtgaccatgctggcactggtatggccattactattaagccggaggcaaccactaatcaggattcttatggtggtgcttccgtttgtatatattgccgctcgcgtgttgaacatccagatgttgatggattgtgcaaattacgcggcaagtttgtccaagtgcccttaggcataaaagatcctgtgtcatatgtgttgacgcatgatgtttgtcaggtttgtggcttttggcgagatggtagctgttcctgtgtaggcacaggctcccagtttcagtcaaaagacacgaactttttaaacggattcggggtacaagtgtaaatgcccgtcttgtaccctgtgccagtggcttggacactgatgttcaattaagggcatttgacatttgtaatgctaatcgagctggcattggtttgtattataaagtgaattgctgccgcttccagcgtgtagatgaggacggcaacaagttggataagttctttgttgttaaaagaactaatttagaagtgtataacaaggagaaagaatgctatgagttgacaaaagaatgcggtgttgtggctgaacacgagttcttcacatttgatgtggagggaagtcgggtaccacacatagtccgtaaagatctttcaaagtttactatgttagatctttgctatgcattgcgtcattttgaccgcaatgattgttcaactcttaaggaaattctccttacatatgctgagtgtgaagagtcctacttccaaaagaaggactggtatgattttgttgagaatcctgatataattaatgtgtacaagaagcttggtcctatatttaatagagccctgcttaacactgccaagtttgcagacgcattagtggaggcaggcttagtaggtgttttaacacttgataatcaagatttatatggtcaatggtatgactttggagattttgtcaagacagtacctggttgtggtgttgccgtggcagactcttattattcatatatgatgccaatgctgactatgtgtcatgcgttggatagtgagttgtttgttaatggtacttatagggagtttgaccttgttcagtatgattttactgatttcaagctagagctgttcactaagtattttaagcattggagtatgacctaccacccgaacacctgtgagtgcgaggatgacaggtgcattattcattgcgccaattttaatatacttttcagcatggtcttacctaagacctgttttgggcctcttgttaggcagatatttgtggatggtgttcctttcgttgtgtcgatcggttaccattataaagaattaggtgttgttatgaatatggatgtggatacacatcgttatcgcttgtctcttaaggacttgcttttgtatgctgcagaccctgcccttcatgtggcgtctgctagtgcactgcttgatttgcgcacatgttgttttagcgttgcagctattacaagtggcgtaaaatttcaaacagttaaacctggaaattttaatcaggatttctacgagtttattttgagtaaaggcctgcttaaagaggggagctccgttgatttgaagcacttcttctttacgcaggatggtaatgctgctattactgattacaattactacaagtataatctacccaccatggtggatattaagcagttgttgtttgttttagaagttgttaataagtacttcgagatctatgagggtgggtgtatacccgcaacacaggtcattgttaataattatgacaagagtgctggctatccatttaataaatttggaaaggccaggctctattatgaggcattatcatttgaggagcaggatgaaatttatgcgtataccaaacgcaatgtcctgccgaccctaactcaaatgaatcttaaatatgctattagtgctaagaatagggcccgcaccgttgctggtgtctctattctcagtactatgactggcagaatgtttcatcaaaagtgtctaaagagtatagcagctactcgcggtgttcctgtagttataggcaccacgaagttctatggcggttgggatgatatgttacgccgccttattaaagatgttgatagtcctgtactcatgggttgggactatcctaaatgtgatcgtgctatgccaaacatactgcgtattgttagtagtttggtgctagcccgtaaacatgattcgtgctgttcgcatacggatagattctatcgtcttgcgaacgagtgcgcccaagttttgagtgaaattgttatgtgtggtggttgttattatgttaaaccaggtggcactagtagtggggatgcaaccactgcttttgctaattctgtgtttaacatttgtcaagctgtttccgccaatgtatgctcgcttatggcatgcaatggacacaaaattgaagatttgagtatacgcgagttacaaaagcgcctatactctaatgtctatcgtgcggaccatgttgaccccgcatttgttagtgagtattatgagtttttaaacaagcattttagtatgatgattttgagtgatgatggtgttgtgtgttataattcagagtttgcgtccaagggttatattgctaatataagtgcctttcaacaggtattatattatcaaaacaacgtgtttatgtctgaggccaaatgttgggtagaaacagacatcgaaaagggaccgcatgaattttgttctcaacatacaatgctagtcaagatggatggtgatgaagtctaccttccataccctgatccttcgagaatcttaggagcaggctgttttgttgatgatttactcaagactgatagcgttctcttgatagagcgtttcgtaagtcttgcaattgatgcttatcctttagtataccatgagaacccagagtatcaaaatgtgttccgggtatatttagaatacatcaagaagctgtacaatgatctcggtaatcagatcctggacagctacagtgttattttaagtacttgtgatggtcaaaagtttactgacgagacgttttacaagaacatgtatttaagaagtgcagtgctgcaaagcgttggtgcctgcgttgtctgtagttctcaaacatcattacgttgtggcagttgcatacgcaagcctttgctgtgttgcaaatgcgcctatgatcatgttatgtccactgatcataaatatgtcctgagtgtgtcaccatatgtgtgtaattcaccgggatgtgatgtaaatgatgttaccaaattgtatttaggtggtatgtcatattattgtgaggaccataaaccacagtattcattcaaattggtgatgaatggtatggtttttggtttatataagcagtcttgtactggttcgccctacatagaggattttaataaaatcgctagttgcaaatggacagaagtcgatgattatgtgctagctaatgaatgcaccgaacgccttaaattgtttgccgcagaaacgcagaaggccacagaagaggcctttaagcaatgttatgcgtcagcaacgatccgtgagatcgtgagcgatcgggagttaattttatcttgggaaattggtaaagtccgcccgccacttaataaaaattacgtgttcaccggctaccattttactaataatggtaagacagttttaggtgagtatgtttttgataagagtgagttgactaatggtgtgtattatcgcgccacaaccacttataagttatctgtaggtgatgtgttcattttaacatcacacgcagtgtctagtttaagtgctcctacattagtaccgcaggagaattatactagcattcgttttgctagtgtttatagtgtgcctgagacgtttcagaataatgtgcctaattatcagcacattggaatgaagcgctattgtactgtacagggaccgcctggtactggtaagtcccatctagccattgggctagctgtttattattgtacagcgcgcgtggtgtataccgctgctagccatgctgcagttgacgcgctgtgtgaaaaggcacataaatttctcaacatcaacgactgcacgcgtattgttcctgcaaaggtgcgtgtagattgttatgataaattcaaggtcaatgacaccactcgcaagtatgtgtttactacaataaatgcattacctgagttggtgactgacattattgtcgttgatgaagttagtatgcttaccaactatgagctgtctgttattaacagtcgtgttagggctaagcattatgtgtatattggcgacccggcgcagttacctgcaccacgtgtgctactgaataagggaactctagaacctagatattttaattccgttaccaagctaatgtgttgtttgggtccagatattttcttgggcacctgttatagatgccctaaggagattgtggatacggtgtcagccttggtttataataataagctgaaggctaaaaatgataatagctccatgtgctttaaggtttattataagggccagactacacatgagagttctagtgctgttaatatgcagcaaatacatttaatttccaagtttctgaaggcaaaccccagttggagtaacgccgtatttattagtccttataactcgcagaactatgttgctaagagagtcttgggattacaaacccagacagtagactcagcgcagggttctgaatatgattttgttatctactcacagactgcggaaacagcgcattctgtcaatgtaaatagattcaatgttgctattacacgtgctaagaagggtattctctgtgtcatgagtagtatgcaattatttgagtctcttaattttactacactgacgttggataagattaacaatccacgattacagtgtactacaaatttgtttaaggattgtagcaggagctatgtaggatatcacccagcccatgcaccatcctttttggcagttgatgacaaatataaggtaggcggtgatttagccgtttgccttaatgttgctgattctgctgtcacttattcgcggcttatatcactcatgggattcaagcttgacttgacccttgatggttattgtaagctgtttataactagagatgaagctatcaaacgtgttagagcctgggttggcttcgatgcagaaggtgcccatgcgatacgtgatagcattgggacaaatttcccattacaattaggcttttcgactggaattgattttgttgtcgaagccactggaatgtttgctgagagagatggttatgtctttaaaaaggcagccgcacgagctcctcctggcgaacaatttaaacaccttatcccacttatgtcaagagggcagaaatgggatgtggttcgcattagaatagtacaaatgttgtcagaccacctagtggatttggcagacagtgttgtacttgtgacgtgggctgccagctttgagctcacatgtttgcgatatttcgctaaagttggaagagaagttgtgtgtagtgtctgcaccaagcgtgcgacatgttttaattctagaactggatactatggatgctggcgacatagttattcctgtgattacctgtacaacccactaatagttgacattcaacagtggggatatacaggatctttaactagcaatcatgatcctatttgcagcgtgcataagggtgctcatgttgcatcatctgatgctatcatgacccggtgtctagctgttcatgattgcttttgtaagtctgttaattggaatttagaataccccattatttcaaatgaggtcagtgttaatacctcctgcaggttattgcagcgcgtaatgtttagggctgcgatgctatgcaataggtatgatgtgtgttatgacattggcaaccctaaaggtcttgcctgtgtcaaaggatatgattttaagttctatgacgcctcccctgttgttaagtctgttaaacagtttgtttacaaatacgaggcacataaagatcaatttttagatggtttgtgtatgttttggaactgcaatgtggataagtatccagcgaatgcagttgtgtgtaggtttgacacgcgtgtgttgaacaaattaaatctccctggctgtaatggtggcagtttgtatgttaacaaacatgcattccacaccagtccctttacccgggctgccttcgagaatttgaagcctatgcctttcttttattattcagatacgccctgtgtgtatatggaaggcatggaatctaagcaggtcgattatgtcccattgagaagcgctacatgcatcacaagatgcaatttaggtggcgctgtttgtttaaaacatgctgaggagtatcgtgagtaccttgagtcttacaatacggcaaccacagcgggttttactttttgggtctataagacttttgatttttacaacctttggaatacttttactaggctccaaagtttagaaaatgtagtgtataacctggtcaacgctggacactttgatggccgggcgggtgaactgccttgtgctgttataggtgagaaagtcattgccaagattcaaaatgaggatgtcgtggtctttaaaaataacacgccattccccactaatgtggctgtcgaattatttgctaagcgcagtattcggccccaccccgagcttaagctctttagaaatttgaatattgacgtgtgctggagtcacgtcctttgggattatgctaaggatagtgtgttttgcagttcgacgtataaggtctgcaaatacacagatttacagtgcattgaaagcttgaatgtactttttgatggtcgtgataatggtgctcttgaagcttttaagaagtgccggaatggcgtctacattaacacgacaaaaattaaaagtctgtcgatgattaaaggcccacaacgtgccgatttgaatggcgtagttgtggagaaagttggagattctgatgtggaattttggtttgctgtgcgtaaagacggtgacgatgttatcttcagccgtacagggagccttgaaccgagccattaccggagcccacaaggtaatccgggtggtaatcgcgtgggtgatctcagcggtaatgaagctctagcgcgtggcactatctttactcaaagcagattattatcttctttcacacctcgatcagagatggagaaagattttatggatttagatgatgatgtgttcattgcaaaatatagtttacaggactacgcgtttgaacacgttgtttatggtagttttaaccagaagattattggaggtttgcatttgcttattggcttagcccgtaggcagcaaaaatccaatctggtaattcaagagttcgtgacatacgactctagcattcattcgtactttatcactgacgagaacagtggtagtagtaagagtgtgtgcactgttattgatttattgttagatgattttgtggacattgtaaagtccctgaatctaaagtgtgtgagtaaggttgttaatgttaatgtggattttaaggacttccagtttatgttgtggtgcaatgaggagaaggtcatgactttctatcctcgtttgcaggctgctgctgactggaaacctggttatgttatgcctgtcttatataagtatttggaatcgcctctggaaagagtaaacctctggaattatggcaagccgattactttacctacaggatgtatgatgaatgttgctaagtatactcaattatgtcaatatttgagcactacaacattagcagttccggctaatatgcgtgtcttacaccttggtgccggttcggataagggtgttgcccctgggtctgcagttcttaggcagtggctaccagcgggaagtattcttgtagataatgatgtgaatccatttgtgagtgacagtgtcgcctcatattatggaaattgtataaccttaccctttgattgtcagtgggatctgataatttctgatatgtacgaccctcttactaagaacattggggagtacaacgtgagtaaagatggattctttacttacctctgtcatttaattcgtgacaagttggctctgggtggcagtgttgccataaaaataacagagttttcttggaacgctgagttatatagtttaatggggaagtttgcgttctggacaatcttttgcaccaacgtaaacgcctcttcaagtgaaggatttttgattggcataaattggttgaataagacccgtaccgaaattgacggtaaaaccatgcatgccaattatctgttttggagaaatagtacaatgtggaatggaggggcttacagtctctttgacatgagtaagttccctttgaaagcggctggtacggctgttgttagccttaaaccagaccaaataaatgacttagtcctctccttgattgagaagggcaagttattagtgcgtgatacacgcaaagaagtttttgttggcgatagcctagtaaatgtcaaataa

SEQ ID NO: 16 - DNA, 9589 bp, Artificial Sequence
  COVAX_SYNCoat56
atctatacttgtcgtggctgtgaaaatggcctttgctgacaagcctaatcatttcataaactttcccctggcccaatttagtggctttatgggtaagtatttaaagctacagtctcaacttgtggaaatgggtttagactgtaaattacagaaggcaccacatgttagtattaccctgcttgatattaaagcagaccaatacaaacaggtggaatttgcaatacaagaaataatagatgatctggcggcatatgagggagatattgtctttgacaaccctcacatgcttggcagatgccttgttcttgatgttagaggatttgaagagttgcatgaagatattgttgaaattctccgcagaaggggttgcacggcagatcaatccagacactggattccgcactgcactgtggcccaatttgacgaagaaagagaaacaaaaggaatgcaattctatcataaagaacccttctacctcaagcataacaacctattaacggatgctgggcttgagctcgtgaagataggttcttccaaaatagatgggttttattgtagtgaactgagtgtttggtgtggtgagaggctttgttataagcctccaacacccaaattcagtgatatatttggctattgctgcatagataaaatacgtggtgatttagaaataggcgacctgccgcaggatgatgaggaagcgtgggccgagctaagttaccactatcaaagaaacacctacttcttcagacatgtgcacgataatagcatctattttcgtaccgtgtgtagaatgaagggttgtatgtgttgatttgtttttacactattagtgtaataagcttattattttgttgaaaagggcaggatgtgcatagctatggctcctcgcacactgcttttgctgatttgatgtcagctggtgtttgggttcaatgaacctcttaacatcgtttcacatttaaatgatgactggtttctatttggtgacagtcggtccgactgtacctatgtagaaaataacggtcatcctaaattagattggcttgacctcgacccaaagttgtgtaattcaggaaagatttccgcaaagagtggtaactctctctttaggagttttcacttcactgatttttacaattatacgggtgagggataccaaattgtattttatgaaggagttaattttagtcccagccatggctttaaatgcctggctcatggagataataaaagatggatgggcaataaagctcgattttatgcccgagtgtatgagaagatggcccaatataggagcctatcgtttgttaatgtgtcttatgcctatggaggtaatgcaaagcccgcctccatttgcaaagacaatactttaacactcaataaccccaccttcatatcgaaggagtctaattatgttgattactactacgagagtgaggctaatttcacactagaaggttgtgatgaatttatagtaccgctctgtggttttaatggccattccaagggctcgtcgtcggatgctgccaataaatattatactgactctcagagttactataatatggatattggtgtcttatatgggttcaattcgaccttggatgttggcaacactgctaaggatccgggtcttgatctcacttgtaggtatcttgcattgactcctggtaattataaggctgtgtccttagaatatttgttaagcttaccctcaaaggctatttgcctccataagacaaagcgctttatgcctgtgcaggtagttgactcaaggtggagtagcatccgccagtcagacaatatgaccgctgcagcctgtcagctgccatattgtttctttcgcaacacatctgcgaattatagtggtggcacacatgatgcgcaccatggtgattttcatttcaggcagttattgtctggtttgttatataatgtttcctgtattgcccagcagggtgcatttctttataataatgtgtcgtcctcttggccagcctatgggtacggtcattgtccaacggcagctaacattggttatatggcacctgtttgtatctatgaccctctcccggtcatactgctaggtgtgttattgggtatagctgtgttgactattgtgtttctgatgttttattttatgacggatagcggtgttagattgcatgaggcataatctaaacatgctgttcgtgtttattctatttttgccctcttgtttagggtatattggtgattttagatgtatccagcttgtgaattcaaacggtgctaatgttagtgctccaagcattagcaccgagacggttgaagtttcacaaggcctggggacatattatgtgttagatcgagtttatttaaatgccacattattgcttactggttactacccggtcgatggttctaagtttagaaacctcgctcttacgggaactaactcagttagcttgtcgtggtttcaaccaccctatttaagtcagtttaatgatggcatatttgcgaaggtgcagaaccttaagacaagtacgccatcaggtgcaactgcatattttcctactatagttataggtagtttgtttggctatacttcctataccgttgtaatagagccatataatggtgttataatggcctcagtgtgccagtataccatttgtcagttaccttacactgattgtaagcctaacactaatggtaataaactgatagggttttggcacacggatgtaaaacccccaatttgtgtgttaaagcgaaatttcacgcttaatgttaatgctgatgcattttattttcatttctaccaacatggtggtactttttatgcgtactatgcggataaaccctccgctactacgtttttgtttagtgtatatatcggcgatattttaacacagtattatgtgttacctttcatctgcaacccaacagctggtagcacttttgctccgcgctattgggttacacctttggttaagcgccaatatttgtttaatttcaaccagaagggtgtcattactagtgctgttgattgtgctagtagttataccagtgaaataaaatgtaagacccagagcatgttacctagcactggtgtctatgagttatccggttatacggtccaaccagttggagttgtataccggcgtgttgctaacctcccagcttgtaatatagaggagtggcttactgctaggtcagtcccctcccctctcaactgggagcgtaagacttttcagaattgcaattttaacttaagcagcctgttacgttatgttcaggctgagagtttgttttgtaataatatcgatgcttccaaagtgtatggccgctgctttggtagtatttcagttgataagtttgctgtaccccgaagtaggcaagttgatttacagcttggtaactctggatttctgcagactgctaattataagattgatacagctgccacttcgtgtcagctgcattacaccttgcctaagaataatgtcaccataaacaaccataacccctcgtcttggaataggaggtatggctttaatgatgctggcgtctttggcaaaaaccaacatgacgttgtttacgctcagcaatgttttactgtaagatctagttattgcccgtgtgctcaaccggacatagttagcccttgcactactcagactaagcctaagtctgcttttgttaatgtgggtgaccattgtgaaggcttaggtgttttagaagataattgtggcaatgctgatccacataagggttgtatctgtgccaacaattcatttattggatggtcacatgatacctgccttgttaatgatcgctgccaaatttttgctaatatattgctgaatggcattaatagtggtaccacatgttccacagatttgcagttgcctaatactgaagtggttactggcatttgtgtcaaatatgacctctacggtattactggacaaggtgtttttaaagaggttaaggctgactattataatagctggcaaacccttctgtatgatgttaatggtaatttgaatggttttcgtgatcttaccactaacaagacttatacgataaggagctgttatagtggccgtgtttctgctgcatttcataaagatgcacccgaaccggctctgctctatcgtaatataaattgtagctatgtttttagcaataatatctcccgtgaggagaacccacttaattactttgatagttatctgggttgtgttgttaatgctgataaccgcacggatgaggcgcttcctaattgtgatctccgtatgggtgctggcttatgcgttgattattcaaaatcacgcagggctcaccgatcagtttctactggctatcggttaactacatttgagccatacactccgatgttagttaatgatagtgtccaatccgttgatggattatatgagatgcaaataccaaccaattttactattgggcaccatgaggagttcattcaaactagatctccaaaggtgactatagattgtgctgcatttgtctgtggtgataacactgcatgcaggcagcagttggttgagtatggctctttctgtgttaatgttaatgccattcttaatgaggttaataacctcttggataatatgcaactacaagttgctagtgcattaatgcagggtgttactataagctcgagactgccagacggcatctcaggccctatagatgacattaattttagtcctctacttggatgcataggttcaacatgtgccgaggacggcaatggacctagtgcaatccgagggcgttctgctatagaggatttgttatttgacaaggtcaaattatctgatgttggctttgtcgaggcttataataattgcaccggtggtcaagaagttcgtgacctcctttgtgtacaatcttttaatggcatcaaagtattacctcctgtgttgtcagagagtcagatctctggctacacaaccggtgctactgcggcagctatgttcccaccgtggtcagcagctgccggtgtgccatttagtttaagtgttcaatatagaattaatggtttaggtgtcactatgaatgtgcttagtgagaaccaaaagatgattgctagtgcttttaacaatgcgctgggtgctatccaggatgggtttgatgcaaccaattctgctttaggtaagatccagtccgttgttaatgcaaatgctgaagcactcaataacttactaaatcaactttctaacaggtttggtgctattagtgcttctttacaagaaattctaactcggcttgaggctgtagaagcaaaagcccagatagatcgtcttattaatggcaggttaactgcacttaatgcgtatatatccaagcaacttagtgatagtacgcttattaaagttagtgctgctcaggccatagaaaaggtcaatgagtgcgttaagagccaaaccacgcgtattaatttctgtggcaatggtaatcatatattatctcttgtccagaatgcgccttatggcttatattttatacacttcagctatgtgccaatatcctttacaaccgcaaatgtgagtcctggactttgcatttctggtgatagaggattagcacctaaagctggatattttgttcaagatgatggagaatggaagttcacaggcagttcatattactaccctgaacccattacagataaaaacagtgtcattatgagtagttgcgcagtaaactacacaaaggcacctgaagttttcttgaacacttcaatacctaatccacccgactttaaggaggagttagataaatggtttaagaatcagacgtctattgcgcctgatttatctctcgatttcgagaagttaaatgttactttgctggacctgacgtatgagatgaacaggattcaggatgcaattaagaagttaaatgagagctacatcaacctcaaggaagttggcacatatgaaatgtatgtgaaatggccttggtatgtttggttgctaattggattagctggtgtagctgtttgtgtgttgttattctttatatgttgctgcacaggttgtggctcatgttgttttaagaagtgtggaaattgttgtgatgagtatggaggacaccaggacagtattgtgatacataatatttcctctcatgaggattgactatcacagcctctcctggaaagacagaaaatctaaacaatttatagcattctcattgctacctggccccgtaagaggcagtcatagctatggccgtgttggtcctaaggctacattggctgctgtctttattggtccatttattgtagcatgtatgctaggcattggcctagtttatttattgcaattgcaagttcaaatttttcatgttaaggataccatacgtgtgactggcaagccagccactgtgtcttatactacaagtacaccagtaacaccgagcgcgacgacgctcgatggtactacgtatactttaattagacccactagctcttatacaagagtttatcttggtactccaagaggttttgattatagtacatttgggcctaagaccctagattatgttactaatctaaacctcatcttaattctggtcgtccatatacttttaaggcattgtccaggcatatgaggccaacagccacatggatttggcatgtgagtgatgcatggttacgccgcacgcgggactttggtgtcattcgcctagaagatttttgttttcaatttaattatagccaaccccgagttggttattgtagagttcctttaaaggcttggtgtagcaaccagggtaaatttgcagcgcagtttaccctaaaaagttgcgaaaaaccaggtcacgaaaaatttattactagcttcacggcctacggcagaactgtccaacaggccgttagcaagttagtagaagaagctgttgattttattctttttagggccacgcagctcgaaagaaatgtttaatttattccttacagacacagtatggtatgtggggcagattatttttatattcgcagtgtgtttgatggtcaccataattgtggttgccttccttgcgtctatcaaactttgtattcaactttgcggtttatgtaatactttggtgctgtccccttctatttatttgtatgataggagtaagcagctttataagtactataatgaagaaatgagactgcccctattagaggtggatgatatctaatccaaacattatgagtagtactactcaggccccagagcccgtctatcaatggaccgccgacgaggcagttcaattccttaaggaatggaacttctcgttgggcattatactactctttattactatcatactacagttcggttacacgagccgtagcatgtttatttatgttgtgaaaatgataatcttgtggttaatgtggccactgactattgttttgtgtattttcaattgcgtgtatgcgctaaataatgtgtatcttggattttctatagtgtttactatagtgtccattgtaatctggatcatgtattttgtgaacagcataaggttgtttatcaggactggtagctggtggagcttcaaccccgaaacaaacaaccttatgtgtatagatatgaaaggtaccgtgtatgttagacccattattgaggattaccatacactaacagccactattattcgtggccacctctacatgcaaggtgttaagctaggcaccggtttctctttgtctgacttgcccgcttatgttacagttgctaaggtgtcacacctttgcacttataagcgcgcattcttagacaaggtagacggtgttagcggttttgctgtttatgtgaagtccaaggtcggaaattaccgactgccctcaaacaaaccgagtggcgcggacaccgcattgttgagaacctaatctaaactttaaggatgtcttttgttcctgggcaagaaaatgccggtggcagaagctcctctgtaaaccgcgctggtaatggaatcctcaagaaaaccacttgggctgaccaaaccgagcgtggaccaaataatcaaaatagaggcagaaggaatcagccaaagcagactgcaactactcaacccaactccgggagtgtggttccccattactcctggttttctggcattacccagttccaaaagggaaaggagtttcagtttgcagaaggacaaggagtgcctattgccaatggaatccccgcttcagagcaaaagggatattggtatagacacaaccgccgttcttttaaaacacctgatgggcagcagaagcaattactgcccagatggtatttttactatcttggcacagggccccatgctggagccagttatggagacagcattgaaggcgtcttttgggttgcaaacagccaagcggacaccaatacccgctctgatattgtcgaaagggacccaagcagtcatgaggctattcctactaggtttgcgcccggcacggtattgcctcagggcttttatgttgaaggctctggaaggtctgccccggccagccgatctggttcgcggtcacaatcccgtgggccaaataatcgcgctagaagcagttccaaccagcgccagcctgcctctactgtaaaacctgatatggccgaagaaattgctgctcttgttttggctaagctcggtaaagatgccggccagcccaagcaagtaacgaagcaaagtgccaaagaagtcaggcagaaaattttaaacaagcctcgccaaaagaggactccaaacaagcagtgcccagtgcagcagtgttttggaaagagaggccccaatcagaattttggaggctctgaaatgttaaaacttggaactagtgatccacagttccccattcttgcagagttggctccaacagttggtgccttcttctttggatctaaattagaattggtcaaaaagaattctggtggtgctgatgaacccaccaaagatgtgtatgagctgcaatattcaggtgcagttagatttgatagtactctacctggttttgagactatcatgaaagtgttgaatgagaatttgaatgcctaccagaaggatggtggtgcagatgtggtgagcccaaagccccaaagaaaagggcgtagacaggctcaggaaaagaaagatgaagtagataatgtaagcgttgcaaagcccaaaagctctgtgcagcgaaatgtaagtagagaattaaccccagaggatagaagtctgttggctcagatccttgatgatggcgtagtgccagatgggttagaagatgactctaatgtgtaaagagaatgaatcctatgtcggcgctcggtggtaacccctcgcgagaaagtcgggataggacactctctatcagaatggatgtcttgctgtcataacagatagagaaggttgtggcagaccctgtatcaattagttgaaagagattgcaaaatagagaatgtgtgagagaagttagcaaggtcctacgtctaaccataagaacggcgataggcgccccctgggaacagctcacatcagggtactattcctgcaatgccctagtaaatgaatgaagttgatcatggccaattggaagaatcac

SEQ ID NO: 17 - DNA, 3822 bp, Artificial Sequence
  COVAX-S19-1
atgtttgtttttcttgttttattgccactagtctctagtcagtgtgttaatcttacaaccagaactcaattaccccctgcatacactaattctttcacacgtggtgtttattaccctgacaaagttttcagatcctcagttttacattcaactcaggacttgttcttacctttcttttccaatgttacttggttccatgctatacatgtctctgggaccaatggtactaagaggtttgataaccctgtcctaccatttaatgatggtgtttactttgcttccactgagaagtctaacataataagaggctggatttttggtactactttagattcgaaaacccagtccctacttattgttaataacgctactaatgttgttatcaaagtctgtgaatttcaattttgtaacgatccatttttgggtgtttattaccacaaaaacaacaaaagttggatggaaagtgagttcagagtttattctagtgcgaataattgcacttttgaatacgtctctcagccttttcttatggaccttgaaggaaaacagggtaatttcaaaaatcttagggaatttgtgttcaagaatattgatggttacttcaagatatactctaagcacacgcctattaatttagtgcgtgatctccctcagggtttttcggctttagaaccattggtagatttgccaataggtattaacatcactaggtttcaaactttacttgctttacatagaagttatttaactcctggtgattcttcttcaggttggacagctggtgctgcagcttattatgtgggttatcttcaacctaggacttttctactgaagtacaatgaaaatggaaccattacagatgctgtagactgtgcacttgaccctctctcagaaacaaagtgtacgttgaaatccttcactgtagaaaaaggaatctatcaaacttctaactttagagtccaaccaacagaatctattgttagatttcctaacatcacaaacttgtgcccttttggtgaagtttttaacgccaccagatttgcatctgtttatgcttggaacaggaagagaatcagcaactgtgttgctgattattctgtcctgtataattccgcatcattttccacttttaagtgttatggagtgtctcctactaaattaaatgatctctgctttactaatgtctatgcagattcatttgtaattagaggtgatgaagtcagacaaatcgctccagggcaaactggaaagattgctgattataactacaaattaccagatgattttacaggctgcgttatagcttggaattctaacaatcttgattctaaggttggtggtaattataattacctgtacagattgtttaggaagtctaatctcaaaccttttgagagagatatttcaactgaaatctatcaggccggtagcacaccttgtaatggtgttgaaggttttaattgttactttcctctgcaatcatatggtttccaacccactaatggtgttggttaccaaccatacagagtagtagtactttcttttgaacttctacatgcaccagcaactgtttgtggacctaaaaagtctactaatttggttaagaacaagtgtgtcaatttcaacttcaatggtttaacaggcacaggtgttcttactgagtctaacaaaaagtttctgcctttccaacaatttggcagagacattgctgacactactgatgctgttcgtgatccacaaacacttgagattcttgacattacaccatgttcttttggtggtgtcagtgttataacaccaggaacaaatacttctaaccaggttgctgttctttatcaggatgttaactgcacagaagtccctgttgctattcatgcagatcaacttactcctacttggcgtgtttattctacaggttctaatgtttttcaaacacgtgcaggctgtttaataggggctgaacatgtcaacaactcatatgagtgtgacatacccattggtgcaggtatatgcgctagttatcagactcagactaattctcctcggagagcaagaagtgtagctagtcaatccatcattgcctacactatgtcacttggtgcagaaaattcagttgcttactctaataactctattgccatacccacaaattttactattagcgttaccacagaaattctaccagtgtctatgaccaagacatcagtagattgtacaatgtacatttgtggtgattcaactgaatgcagcaatcttttgttgcaatatggcagtttttgtacacaattaaaccgtgctttaactggaatagctgttgaacaagacaaaaacacccaagaagtttttgcacaagtcaaacaaatttacaagacaccaccaattaaagattttggcggttttaattttagccagatactgccagatccatcaaaaccaagcaagaggtcatttattgaagatctactgttcaacaaagtgacacttgcagatgctggcttcatcaaacaatatggtgattgccttggtgatattgctgctagagacctcatttgtgcacaaaagtttaacggccttactgttttgccacctttgctcacagatgaaatgattgctcaatacacttctgcactgttagcaggtacaatcacttctggttggacttttggtgcaggtgctgcattacaaataccatttgctatgcaaatggcttataggtttaatggtattggagttacacagaatgttctctatgagaaccaaaaattgattgccaaccaatttaatagtgctattggcaaaattcaagactcactttcttccacagcaagtgcacttggaaaacttcaagatgtggtcaaccaaaatgcacaagctttaaacacgcttgttaaacaacttagctccaattttggtgcaatttcaagtgttttaaacgacatcctttcacgtcttgacaaagttgaggctgaagtgcaaattgataggttgatcacaggcagacttcaaagtttgcagacatatgtgactcaacaattaattagagctgcagaaatcagagcttctgctaatcttgctgctactaaaatgtcagagtgtgtacttggacaatcaaaaagagttgacttttgcggaaagggctatcatcttatgtcatttcctcagtcagcacctcatggtgtcgtctttttgcatgtgacttatgtccctgcacaagaaaagaacttcacaactgctcctgccatttgtcatgatggaaaagcacactttcctcgtgaaggtgtctttgtttcaaatggcacacactggtttgtaacacaaaggaatttttatgaaccacaaatcattactacagacaacacatttgtgtctggtaactgtgatgttgtaataggaattgtcaacaacacagtttatgatcctttgcaacctgaattagactcattcaaggaggagcttgataaatacttcaagaaccatacctcaccagatgttgatttaggtgacatctctggcattaatgcttcagttgtaaacattcagaaagaaatcgaccgcctcaatgaggttgccaagaatttaaatgaatctctcatcgatctccaagaacttggaaagtatgagcagtatataaaatggccatggtacatttggctaggttttatagctggcttgattgccatagtaatggtgacaattatgctttgctgtatgaccagttgctgtagttgtctcaagggctgttgttcttgtggatcctgctgcaaatttgacgaggacgactctgagccagtgctcaaaggagtcaaattacattacacataa

SEQ ID NO: 18 - protein, 1273 aa, Artificial Sequence
  S-Protein_Sars-CoV2
MFVFLVLLPLVSSQCVNLTTRTQLPPAYTNSFTRGVYYPDKVFRSSVLHSTQDLFLPFFSNVTWFHAIHVSGTNGTKRFDNPVLPFNDGVYFASTEKSNIIRGWIFGTTLDSKTQSLLIVNNATNVVIKVCEFQFCNDPFLGVYYHKNNKSWMESEFRVYSSANNCTFEYVSQPFLMDLEGKQGNFKNLREFVFKNIDGYFKIYSKHTPINLVRDLPQGFSALEPLVDLPIGINITRFQTLLALHRSYLTPGDSSSGWTAGAAAYYVGYLQPRTFLLKYNENGTITDAVDCALDPLSETKCTLKSFTVEKGIYQTSNFRVQPTESIVRFPNITNLCPFGEVFNATRFASVYAWNRKRISNCVADYSVLYNSASFSTFKCYGVSPTKLNDLCFTNVYADSFVIRGDEVRQIAPGQTGKIADYNYKLPDDFTGCVIAWNSNNLDSKVGGNYNYLYRLFRKSNLKPFERDISTEIYQAGSTPCNGVEGFNCYFPLQSYGFQPTNGVGYQPYRVVVLSFELLHAPATVCGPKKSTNLVKNKCVNFNFNGLTGTGVLTESNKKFLPFQQFGRDIADTTDAVRDPQTLEILDITPCSFGGVSVITPGTNTSNQVAVLYQDVNCTEVPVAIHADQLTPTWRVYSTGSNVFQTRAGCLIGAEHVNNSYECDIPIGAGICASYQTQTNSPRRARSVASQSIIAYTMSLGAENSVAYSNNSIAIPTNFTISVTTEILPVSMTKTSVDCTMYICGDSTECSNLLLQYGSFCTQLNRALTGIAVEQDKNTQEVFAQVKQIYKTPPIKDFGGFNFSQILPDPSKPSKRSFIEDLLFNKVTLADAGFIKQYGDCLGDIAARDLICAQKFNGLTVLPPLLTDEMIAQYTSALLAGTITSGWTFGAGAALQIPFAMQMAYRFNGIGVTQNVLYENQKLIANQFNSAIGKIQDSLSSTASALGKLQDVVNQNAQALNTLVKQLSSNFGAISSVLNDILSRLDKVEAEVQIDRLITGRLQSLQTYVTQQLIRAAEIRASANLAATKMSECVLGQSKRVDFCGKGYHLMSFPQSAPHGVVFLHVTYVPAQEKNFTTAPAICHDGKAHFPREGVFVSNGTHWFVTQRNFYEPQIITTDNTFVSGNCDVVIGIVNNTVYDPLQPELDSFKEELDKYFKNHTSPDVDLGDISGINASVVNIQKEIDRLNEVAKNLNESLIDLQELGKYEQYIKWPWYIWLGFIAGLIAIVMVTIMLCCMTSCCSCLKGCCSCGSCCKFDEDDSEPVLKGVKLHYT

SEQ ID NO: 19 - DNA, 4486 bp, Artificial Sequence
  COVAX-S19-2
acgaacttatggatttgtttatgagaatcttcacaattggaactgtaactttgaagcaaggtgaaatcaaggatgctactccttcagattttgttagagctactgcaacgataccgatacaagcatcacttcctttcggatggcttattgttggcgttgcacttcttgctgtttttcagagcgcttccaaaatcataaccctcaaaaagagatggcaactagcactctccaagggtgttcactttgtttgcaacttgctgttgttgtttgtaacagtttactcacatcttttgcttgttgctgctggccttgaagccccttttctctatctttatgctttagtctacttcttgcagagtataaactttgtacgcataataatgaggctttggctttgctggaaatgccgttccaaaaacccattactttatgatgccaactattttctttgctggcatactaattgttacgactattgtataccttacaatagtgtaacttcttcaattgtcattacttcaggtgatggcacaacaagtcctatttctgaacatgactaccagattggtggttatactgaaaaatgggaatctggagtaaaagactgtgttgtattacacagttacttcacttcagactattaccagctgtactcaactcaattgagtacagacactggtgttgaacatgttaccttcttcatctacaataaaatcgttgatgagcctgaagaacatgtccaaattcacacaatcgacggttcatccggagttgttaatccagtaatggaaccaatttatgatgaaccgacgacgactactagcgtgcctttgtaagcacaagctgatgagtacgaacttatgtactcattcgtttcggaagagacaggtacgttaatagttaatagcgtacttctttttcttgctttcgtggtattcttgctagttacactagccattcttactgcgcttcgattgtgtgcgtactgttgcaatattgttaacgtgagtcttgtaaaaccttctttttacgtttactctcgtgttaaaaatctgaattcttctcgggttcctgatcttctggtctaaacgaactaaatattatattagtttttctgtttggaactttaattttagccatggcagattccaacggtactattaccgttgaggagctgaaaaagctccttgaacaatggaacctagtaataggtttcctattccttacatggatttgcctgctgcaatttgcctatgccaacaggaataggtttttgtacatcattaagttgattttcctctggctgttatggccagtaactttagcttgttttgtgcttgctgctgtttacagaataaattggatcaccggtggaattgctattgcaatggcttgtcttgtaggattgatgtggctaagctacttcattgcttctttcagactgtttgcgcgtacgcgttccatgtggtcattcaatccagaaactaacattcttctcaacgtgccactccatggaactattctgactagaccgcttctagaaagtgaactcgtaatcggagctgttatccttcgtggacatcttcgtattgctggacatcatctaggacgctgtgacatcaaggatctacctaaagaaatcactgttgctacatcacgaacgctttcttattacaaattgggagcttcacagcgtgtagcaggtgattcaggttttgctgcatatagtcgctacaggattggcaactataaattaaacacagaccattccagtagcagtgacaatattgctttgcttgtacagtaagtgacaacagatgtttcatctcgttgactttcaggttactatagcagagatattactaatcatcatgaggacttttaaagtttccatttggaatcttgattacatcataaacctcataattaagaacttaagcaagtcactaactgagaataaatattctcaactagacgaggagcagccaatggagattgattaaacgaacatgaaaattattcttttcttggcactgataacactcgctacttgtgagctttatcactaccaagagtgtgttagaggtacaacagtacttttaaaagaaccttgctcgtcgggaacatacgagggcaattcaccatttcatcctctagctgataacaaatttgcactgacttgctttagcactcaatttgcttttgcttgtcctgacggcgtaaaacacgtctatcagttacgtgccagatcagtttcacctaaactgttcatcagacaagaggaagttcaagaactttactctccaatttttcttattgttgcggcaatagtgtttataacactttgcttcacactcaaaagaaagacagaatgattgaactttcattaattgacttctatttgtgctttttagcctttctgctattccttgttttaattatgcttattatcttttggttctcacttgaactgcaagatcataatgaaacttgtcacgcctaaacgaacatgaaatttcttgttttcttaggaatcatcacaactgtagctgcatttcaccaagaatgtagtttacagtcatgtactcaacatcaaccatatgtagttgatgacccgtgtcctattcacttctattctaaatggtatatcagagtaggagctagaaaatcagcacctttaattgaattgtgcgtggatgaggctggttctaaatcacccattcagtacatcgatatcggtaattatacagtttcctgtttaccttttacaattaactgccaggaacctaaattgggtagtcttgtagtgcgttgttcgttctacgaggactttttagagtatcatgacgttcgtgttgttttagatttcatctaaacgaacaaactaaaatgtctgataatggacctcaaaatcagcgaaatgcacctcgcattacgtttggtggaccatcagattcaactggcagtaaccagaatggagaacgaagtggtgcgcgatcaaaacaacgccgcccgcaaggtttacccaataatactgcgtcttggttcaccgctctcactcaacatggcaaggaagatttaaaattccctcgaggacaaggcgttccaattaacaccaatagcagtccagatgaccaaattggctactaccgccgcgccacaagacgaattcgtggtggtgatggtaaaatgaaagatctcagtccaagatggtatttctactatctaggaactgggccagaagctggacttccttatggtgctaacaaagatggcatcatatgggttgcaactgagggagccttgaatacaccaaaagatcacattggcaccagaaatcctgctaacaatgctgcaatcgtgctacaacttcctcaaggaacaacattaccaaaaggtttttacgcagaagggtctagaggtggaagtcaagcctcttctagatcatcatcacgtagtcgcaacagttcaagaaattcaactccaggttcaagtagaggaacttctcctgctagaatggctggaaatggaggtgatgctgctcttgctttgttactacttgacagattgaaccagcttgagagcaaaatgtctggtaaaggccaacaacaacaaggccaaactgtcactaagaaatctgctgctgaggcttctaagaagcctagacaaaaacgtactgccactaaagcatacaatgtaacacaagctttcggcagacgtggtccagaacaaactcaaggaaattttggggatcaggaactaatcagacaaggaactgattacaaacattggccgcaaattgcacaatttgctccttctgcttcagcgttctttggaatgtcgagaattggaatggaagtcacaccttcgggaacatggttgacctatacaggtgccatcaaattggatgacaaagatccaaatttcaaagatcaagtcattttgctgaataagcatattgacgcatacaaaacattcccaccaacagagcctaaaaaggacaaaaagaagaaggctgatgaaactcaagccttaccgcagagacagaagaaacagcaaactgtgactcttcttcctgctgcagatttggatgatttctccaaacaattgcaacaatccatgagcagtgctgactcaactcaggcctaaactcatgcagaccacacaaggcagatgggctatataaacgttttcgcttttccgtttacgatatatagtctactcttgtgcagaatgaattctcgtaactacatagcacaagtagatgtagttaactttaatctcacatagcaatctttaatcagtgtgtaacattagggaggacttgaaagagccaccacattttcaccgaggccacgcggagtacgatcgagtgtacagtgaacaatgctagggagagctgcctatatggatgagccctaatgtgtaaaattaattttagtagtgctatccccatgtgattttaatagcttcttaggagaatgac

SEQ ID NO: 20 - protein, 275 aa, Artificial Sequence
  Synthetic_ORF3a_Protein
MDLFMRIFTIGTVTLKQGEIKDATPSDFVRATATIPIQASLPFGWLIVGVALLAVFQSASKIITLKKRWQLALSKGVHFVCNLLLLFVTVYSHLLLVAAGLEAPFLYLYALVYFLQSINFVRIIMRLWLCWKCRSKNPLLYDANYFLCWHTNCYDYCIPYNSVTSSIVITSGDGTTSPISEHDYQIGGYTEKWESGVKDCVVLHSYFTSDYYQLYSTQLSTDTGVEHVTFFIYNKIVDEPEEHVQIHTIDGSSGVVNPVMEPIYDEPTTTTSVPL

SEQ ID NO: 21 - protein, 75 aa, Artificial Sequence
  Synthetic_Structural_Protein_E
MYSFVSEETGTLIVNSVLLFLAFVVFLLVTLAILTALRLCAYCCNIVNVSLVKPSFYVYSRVKNLNSSRVPDLLV

SEQ ID NO: 22 - protein, 222 aa, Artificial Sequence
  Synthetic_Membrane_Glycoprotein_M
MADSNGTITVEELKKLLEQWNLVIGFLFLTWICLLQFAYANRNRFLYIIKLIFLWLLWPVTLACFVLAAVYRINWITGGIAIAMACLVGLMWLSYFIASFRLFARTRSMWSFNPETNILLNVPLHGTILTRPLLESELVIGAVILRGHLRIAGHHLGRCDIKDLPKEITVATSRTLSYYKLGASQRVAGDSGFAAYSRYRIGNYKLNTDHSSSSDNIALLVQ

SEQ ID NO: 23 - protein, 61 aa, Artificial Sequence
  Synthetic_ORF6_Protein
MFHLVDFQVTIAEILLIIMRTFKVSIWNLDYIINLIIKNLSKSLTENKYSQLDEEQPMEID

SEQ ID NO: 24 - protein, 121 aa, Artificial Sequence
  Synthetic_ORF7a_Protein
MKIILFLALITLATCELYHYQECVRGTTVLLKEPCSSGTYEGNSPFHPLADNKFALTCFSTQFAFACPDGVKHVYQLRARSVSPKLFIRQEEVQELYSPIFLIVAAIVFITLCFTLKRKTE

SEQ ID NO: 25 - protein, 121 aa, Artificial Sequence
  Synthetic_ORF8_Protein
MKFLVFLGIITTVAAFHQECSLQSCTQHQPYVVDDPCPIHFYSKWYIRVGARKSAPLIELCVDEAGSKSPIQYIDIGNYTVSCLPFTINCQEPKLGSLVVRCSFYEDFLEYHDVRVVLDFI

SEQ ID NO: 26 - protein, 419 aa, Artificial Sequence
  Synthetic_Nulceocapsid_Phosphoprotein
MSDNGPQNQRNAPRITFGGPSDSTGSNQNGERSGARSKQRRPQGLPNNTASWFTALTQHGKEDLKFPRGQGVPINTNSSPDDQIGYYRRATRRIRGGDGKMKDLSPRWYFYYLGTGPEAGLPYGANKDGIIWVATEGALNTPKDHIGTRNPANNAAIVLQLPQGTTLPKGFYAEGSRGGSQASSRSSSRSRNSSRNSTPGSSRGTSPARMAGNGGDAALALLLLDRLNQLESKMSGKGQQQQGQTVTKKSAAEASKKPRQKRTATKAYNVTQAFGRRGPEQTQGNFGDQELIRQGTDYKHWPQIAQFAPSASAFFGMSRIGMEVTPSGTWLTYTGAIKLDDKDPNFKDQVILLNKHIDAYKTFPPTEPKKDKKKKADETQALPQRQKKQQTVTLLPAADLDDFSKQLQQSMSSADSTQA

SEQ ID NO: 27 - protein, 38 aa, Artificial Sequence
  Synthetic_ORF10_Protein
MGYINVFAFPFTIYSLLLCRMNSRNYIAQVDVVNFNLT

SEQ ID NO: 28 - DNA, 18 bp, Artificial Sequence
  T7_promotor
taatacgactcactatag

SEQ ID NO: 29 - DNA, 26 bp, Artificial Sequence
  PolyA-Element
aaaaaaaaaaaaaaaaaaaacggccg

SEQ ID NO: 30 - DNA, 21536 bp, Artificial Sequence
  COVAX-Polyprotein encoding sequence
atggcaaagatgggcaaatacggcctgggcttcaaatgggccccagaatttccatggatgcttccgaacgcatcggagaagttgggtaaccctgagaggtcagaggaggatgggttttgcccctctgctgcgcaagaaccgaaagttaaaggaaaaactttggttaatcacgtgagggtgaattgtagccggcttccagctttggaatgctgtgttcagtctgccataatccgtgatatttttgtagatgaggatccccagaaggtggaggcctcaactatgatggcattgcagttcggtagtgccgtcttggttaagccatccaagcgcttgtctattcaggcatggactaatttgggtgtgcttcccaaaacagctgccatggggttgttcaagcgcgtctgcctgtgtaacaccagggagtgctcttgtgacgcccacgtggcctttcacctttttacggtccaacccgatggtgtatgcctgggtaatggccgttttataggctggttcgttccagtcacagccataccggagtatgcgaagcagtggttgcaaccctggtccatccttcttcgtaagggtggtaacaaagggtctgtgacatccggccacttccgccgcgctgttaccatgcctgtgtatgactttaatgtagaggatgcttgtgaggaggttcatcttaacccgaagggtaagtactcctgcaaggcgtatgccctgctgaagggctatcgcggtgttaagcccatcctgtttgtggaccagtatggttgcgactatactggatgtctcgccaagggtcttgaggactatggcgatctcaccttgagtgagatgaaggagttgttccctgtgtggcgtgactccttggatagtgaagtccttgtggcttggcacgttgatcgagatcctcgggctgctatgcgtctgcagactcttgctactgtacgttgcattgattatgtgggccaaccgaccgaggatgtggtggatggagatgtggtagtgcgtgagcctgctcatcttctcgcagccaatgccattgttaaaagactcccccgtttggtggagactatgctgtatacggattcgtccgttacagaattctgttataaaaccaagctgtgtgaatgcggttttatcacgcagtttggctatgtggattgttgtggtgacacctgtgattttcgtgggtgggttgccggcaatatgatggatggctttccatgtccagggtgtaccaaaaattatatgccctgggaattggaggcccagtcatcaggtgttataccagaaggaggtgttctattcactcagagcactgatacagtgaatcgtgagtcctttaagctctacggtcatgctgttgtgccttttggttctgctgtgtattggagcccttgcccaggtatgtggcttccagtaatttggtcgtcggttaagtcatactctggtttgacttatacaggagtagttggttgtaaggcaattgttcaagagacagacgctatatgtcgttctctgtatatggattatgtccagcacaagtgtggcaatctcgagcagagagctatccttggattggacgatgtctatcatagacagttgcttgtgaataggggtgactatagtctcctccttgagaatgtggatttgtttgttaagcggcgcgctgaatttgcttgcaaattcgccacctgtggagatggtcttgtacccctcctactagatggtttagtgccccgcagttattatttgattaagagtggtcaagctttcacctctatgatggttaattttagccatgaggtgactgacatgtgtatggacatggctttattgttcatgcatgatgttaaagtggccactaagtatgttaagaaggttactggcaaactggccgtgcgctttaaagcgttgggtgtagccgttgtcagaaaaattactgaatggtttgatttagccgtggacattgctgctagtgccgctggatggctttgctaccagctggtaaatggcttatttgcagtggccaatggtgttataacctttgtacaggaggtgcctgagcttgtcaagaattttgttgacaagttcaaggcatttttcaaggttttgatcgactctatgtcggtttctatcttgtctggacttactgttgtcaagactgcctcaaatagggtgtgtcttgctggcagtaaggtttatgaagttgtgcagaaatctttgtctgcatatgttatgcctgtgggttgcagcgaagccacttgtttggtgggtgagattgaacctgcagtttttgaagatgatgttgttgatgtggttaaagccccattaacatatcaaggctgttgtaagccacccacttctttcgagaagatttgtattgtggataaattgtatatggccaagtgtggtgatcaattttaccctgtggttgttgataacgacactgttggcgtgttagatcagtgctggaggtttccctgtgcgggcaagaaagtcgagtttaacgacaagcccaaagtcaggaagataccctccacccgtaagattaagatcaccttcgcactggatgcgacctttgatagtgttctttcgaaggcgtgttcagagtttgaagttgataaagatgttacattggatgagctgcttgatgttgtgcttgacgcagttgagagtacgctcagcccttgtaaggagcatgatgtgataggcacaaaagtttgtgctttacttgataggttggcaggagattatgtctatctttttgatgagggaggcgatgaagtgatcgccccgaggatgtattgttccttttctgctcctgatgacgaggactgcgttgcagcggatgttgtagatgcagatgaaaaccaagatgatgatgccgaggactcagcagtccttgtcgctgatacccaagaagaggacggcgttgccaaggggcaggttgaggcggattcggaaatttgcgttgcgcatactggtagtcaagaagaattggctgagcctgatgctgtcggatctcaaactcccatcgcctctgctgaggaaaccgaagtcggagaggcaagcgacagggaagggattgctgaggcgaaggcaactgtgtgtgctgatgctgtagatgcctgccccgatcaagtggaggcatttgaaattgaaaaggtcgaggactctatcttggatgagcttcaaactgaacttaatgcgccagcggacaagacctatgaggatgtcttggcattcgatgccgtatgctcagaggcgttgtctgcattctatgctgtgccgagtgatgagacgcactttaaagtgtgtggattctattcgcctgctatagagcgcactaattgttggctgcgttctactttgatagtaatgcagagtctacctttggaatttaaagacttggagatgcaaaagctctggttgtcttacaaggccggctatgaccaatgctttgtggacaaactagttaagagcgtgcccaagtctattatccttccacaaggtggttatgtggcagattttgcctatttctttctaagccagtgtagctttaaagcttatgctaactggcgttgtttagagtgtgacatggagttaaagcttcaaggcttggacgccatgtttttctatggggacgttgtgtctcatatgtgcaagtgtggtaatagcatgaccttgttgtctgcagatataccctacactttgcattttggagtgcgagatgataagttttgcgctttttacacgccaagaaaggtctttagggctgcttgtgcggtagatgttaatgattgtcactctatggctgtagtagagggcaagcaaattgatggtaaagtggttaccaaatttattggtgacaaatttgattttatggtgggttacgggatgacatttagtatgtctccttttgaactcgcccagttatatggttcatgtataacaccaaatgtttgttttgttaaaggagatgttataaaggttgttcgcttagttaatgctgaagtcattgttaaccctgctaatgggcgtatggctcatggtgccggcgtcgccggcgccatagctgaaaaggcgggcagtgcttttattaaagaaacctccgatatggtgaaggctcagggcgtttgccaggttggtgaatgctatgaatctgccggtggtaagttatgtaaaaaggtgcttaacattgtagggccagatgcgcgagggcatggcaagcaatgctattcacttttagagcgtgcttatcagcatattaataagtgtgacaatgttgtcactactttaatttcggctggtatatttagtgtgcctactgatgtctccctaacttacttacttggtgtagtgacaaagaatgtcattcttgtcagtaacaaccaggatgattttgatgtgatagagaagtgtcaggtgacctccgttgctggtaccaaagcgctatcacttcaattggccaaaaatttgtgccgtgatgtaaagtttgtgacgaatgcatgtagttcgctttttagtgaatcttgctttgtctcaagctatgatgtgttgcaggaagttgaagcgctgcgacatgatatacaattggatgatgatgctcgtgtctttgtgcaggctaatatggactgtctgcccacagactggcgtctcgttaacaaatttgatagtgttgatggtgttagaaccattaagtattttgaatgcccgggcgggatttttgtatccagccagggcaaaaagtttggttatgttcagaatggttcatttaaggaggcgagtgttagccaaataagggctttactcgctaataaggttgatgtcttgtgtactgttgatggtgttaacttccgctcctgctgcgtagcagagggtgaagtttttggcaagacattaggttcagtcttttgtgatggcataaatgtcaccaaagttaggtgtagtgccatttacaagggtaaggttttctttcagtacagtgatttgtccgaggcagatcttgtggctgttaaagatgcctttggttttgatgaaccacaactgctgaagtactacactatgcttggcatgtgtaagtggccagtagttgtttgtggcaattattttgctttcaagcagtcaaataataattgctacatcaacgtggcatgtttaatgctgcaacacttgagtttaaagtttcctaagtggcaatggcaagaggcttggaacgagttccgctctggtaaaccactaaggtttgtgtccttggtattagcaaagggcagctttaaatttaatgaaccttctgattctatcgattttatgcgtgtggtgctacgtgaagcagatttgagtggtgccacgtgcaatttggaatttgtttgtaaatgtggtgtgaagcaagagcagcgcaaaggtgttgacgctgttatgcattttggtacgttggataaaggtgatcttgtcaggggttataatatcgcatgtacgtgcggtagtaaacttgtgcattgcacccaatttaacgtaccatttttaatttgctccaacacaccagagggtaggaaactgcccgacgatgttgttgcagctaatatttttactggtggtagtgtgggccattacacgcatgtgaaatgtaaacccaagtaccagctttatgatgcttgtaatgttaataaggtttcggaggctaagggtaattttaccgattgcctctaccttaaaaatttaaagcaaaccttctcgtctgtgctgacgactttttatttagatgacgtaaagtgtgtggagtataagccagatttatcgcagtattactgtgagtctggtaaatattatacaaaacccattattaaggcccaatttagaacatttgagaaggttgatggtgtctataccaactttaaattggtgggacatagtattgctgaaaaactcaatgctaagctgggatttgattgtaattctccctttgtggagtataaaattacagagtggccaacagctactggagatgtggtgttggctagtgatgatttgtatgtaagtcggtacttaagcgggtgcattacttttggtaaaccggttgtctggcttggccatgaggaagcatcgctgaaatctctcacatattttaatagacctagtgtcgtttgtgaaaataaatttaacgtgttgcccgttgatgtcagtgaacccacggacaaggggcctgtgcctgctgcagtccttgttaccggcgtccctggagctgatgcgtcagctggtgccggtattgccaaggagcaaaaagcctgtgcttctgctagtgtggaggatcaggttgttacggaggttcgtcaagagccatctgtttcagctgctgatgtcaaagaggttaaattgaatggtgttaaaaagcctgttaaggtggaaggtagtgtggttgttaatgatcccactagcgaaaccaaagttgttaaaagtttgtctattgttgatgtctatgatatgttcctgacagggtgtaagtatgtggtttggactgctaatgagttgtctcgactagtaaattcaccgactgttagggagtatgtgaagtggggtatgggaaagattgtaacacccgctaagttgttgttgttaagagatgagaagcaagagttcgtagcgccaaaagtagtcaaggcgaaagctattgcctgctattgtgctgtgaagtggtttctcctctattgttttagttggataaagtttaatactgacaataaggttatatacaccacagaagtagcttcaaagcttactttcaagttgtgctgtttggcctttaagaatgccttacagacgtttaattggagcgttgtgtctaggggctttttcctagttgcaacggtctttttactctggtttaactttttgtatgctaatgttattttgagtgacttctatttgcctaatattgggcctctccctacgtttgtgggacagatagttgcgtggtttaagactacatttggtgtgtcaaccatctgtgatttctaccaggtgacggatttgggctatagaagttcgttttgtaatggaagtatggtatgtgaactatgcttctcaggttttgatatgctggacaactatgatgctataaatgttgttcaacacgttgtagataggcgtttgtcctttgactatattagcctatttaaactggtagttgagcttgtaatcggctactctctttatactgtgtgcttctacccactgtttgtccttattggaatgcagttattgaccacatggttgcctgaattctttatgctggagactatgcattggagtgctcgtttgtttgtgtttgttgccaatatgcttccagcttttacgttactgcgattttacatcgtggtgacagctatgtataaggtctattgtctttgtagacatgttatgtatggatgtagtaagcctggttgcttgttttgttataagagaaaccgtagtgtccgtgttaagtgtagcaccgttgttggtggttcactacgctattacgatgtaatggctaacggcggcacaggtttctgtacaaagcaccagtggaactgtcttaattgcaattcctggaaaccaggcaatacattcataactcatgaagcagcggcggacctctctaaggagttgaaacgccctgtgaatccaacagattctgcttattactcggtcacagaggttaagcaggttggttgttccatgcgtttgttctacgagagagatggacagcgtgtttatgatgatgttaatgctagtttgtttgtggacatgaatggtctgctgcattctaaagttaaaggtgtgcctgaaacgcatgttgtggttgttgagaatgaagctgataaagctggttttctcggcgccgcagtgttttatgcacaatcgctctacagacctatgttgatggtggaaaagaaattaataactaccgccaacactggtttgtctgttagtcgaactatgtttgacctttatgtagattcattgctgaacgtcctcgacgtggatcgcaagagtctaacaagttttgtaaatgctgcgcacaactctctaaaggagggtgttcagcttgaacaagttatggatacctttattggctgtgcccgacgtaagtgtgctatagattctgatgttgaaaccaagtctattaccaagtccgtcatgtcggcagtaaatgctggcgttgattttacggatgagagttgtaataacttggtgcctacctatgttaaaagtgacactatcgttgcagccgatttgggtgttcttattcagaataatgctaagcatgtacaggctaatgttgctaaagccgctaatgtggcttgcatttggtctgtggatgcttttaaccagctatctgctgacttacagcataggctgcgaaaagcatgttcaaaaactggcttgaagattaagcttacttataataagcaggaggcaaatgttcctattttaactacaccgttctctcttaaagggggcgctgtttttagtagaatgttacaatggttgtttgttgctaatttgatttgtttcattgtgttgtgggcccttatgccaacatatgcagtgcacaaatcggatatgcagttgcctttatatgccagttttaaagttatagataacggtgtgctaagggatgtgtctgttactgacgcatgcttcgcaaacaaatttaatcaattcgaccaatggtatgagtctacttttggtcttgcttattaccgcaactctaaggcttgtcctgttgtggttgctgtaatagatcaagacattggccataccttatttaatgttcctaccacagttttaagatatggatttcatgtgttgcattttataacccatgcatttgctactgatagcgtgcagtgttacacgccacatatgcaaatcccctatgataatttctatgctagtggttgcgtgttgtcatccctctgtactatgcttgcgcatgcagatggaaccccgcatccttattgttatacagggggtgttatgcataatgcctctctgtatagttctttggctcctcatgtccgttataacctggctagttcaaatggttatatacgttttcccgaagtggttagtgaaggcattgtgcgtgttgtgcgcactcgctctatgacctactgcagggttggtttatgtgaggaggccgaggagggtatctgctttaattttaatcgttcatgggtattgaacaacccgtattatagggccatgcctggaactttttgtggtaggaatgcttttgatttaatacatcaagttttaggaggattagtgcggcctattgatttctttgccttaacggcgagttcagtggctggtgctatccttgcaattattgtcgttttggctttctattatttaatcaagcttaagcgtgcctttggtgactacactagtgttgtggttatcaatgtaattgtgtggtgtataaattttctgatgctttttgtgtttcaggtttatcccacattgtcttgtttatatgcttgtttctacttctacaccacgctttatttcccttcggagataagtgttgttatgcatttgcaatggcttgtcatgtatggtgctattatgcccttgtggttttgcattatttacgtggcagtcgttgtttcaaaccatgcattgtggttgttctcttactgccgcaaaattggtaccgaggttcgtagtgacggcacatttgaggaaatggcccttactacctttatgattactaaagaatcttattgtaagttgaaaaactctgtttctgatgttgcttttaacaggtacttgagtctttacaacaagtaccgttacttcagtggcaaaatggatactgccgcttatagagaggctgcctgttcacaactggcaaaggcaatggaaacatttaaccataataatggtaatgatgttctctatcagcctccaaccgcctctgttactacatcatttttacagtctggtatagtgaagatggtgtcgcccacctctaaagtggagccttgtattgttagtgttacttatggtaacatgacacttaatgggttgtggttggatgataaagtttattgcccaagacatgttatctgttcttcagctgacatgacagaccctgattatcctaatttgctttgtagagtgacatcaagtgatttttgtgttatgtctggtcgtatgagccttactgtaatgtcttatcaaatgcagggctgccaacttgttttgactgttacactgcaaaatcctaacacgcctaagtattccttcggtgttgttaagcctggtgagacatttactgtactggctgcatacaatggcagacctcaaggagccttccatgttacgcttcgtagtagccataccataaagggctcctttctatgtggatcctgcggttctgtaggatatgttttaactggcgatagtgtacgatttgtttatatgcatcagctagagttgagtactggttgtcataccggtactgactttagtgggaacttttatggtccctatagagatgcgcaagttgtacaattgcctgttcaggattatacgcagactgttaatgttgtagcttggctttatgctgctatttttaacagatgcaactggtttgtgcaaagtgatagttgttccctggaggagtttaatgtttgggctatgaccaatggttttagctcaatcaaagccgatcttgtcttggatgcgcttgcttctatgacaggcgttacagttgaacaggtgttggccgctattaagaggctgcattctggattccagggcaaacaaattttaggtagttgtgtgcttgaagatgagctgacaccaagtgatgtttatcaacaactagctggtgtcaagctacagtcaaagcgcacaagagttataaaaggtacatgttgctggatattggcttcaacgtttttgttctgtagcattatctcagcatttgtaaaatggactatgtttatgtatgttactacccatatgttgggagtgacattgtgtgcactttgttttgtaagctttgctatgttgttgatcaagcataagcatttgtatttaactatgtacatcatgcctgtgttatgcacactgttttacaccaactatttggttgtgtacaaacagagttttagaggtctagcttatgcttggctttcacactttgtccctgctgtagattatacatatatggatgaagttttatatggtgttgtgttgctagtagctatggtgtttgttaccatgcgtagcataaaccacgacgtcttttctattatgttcttggttggtagacttgtcagcctggtatccatgtggtattttggagccaatttagaggaagaggtactattgttcctcacatccctatttggcacgtacacatggactactatgttgtcattggctaccgctaaggttattgctaaatggttggctgtgaatgtcttgtacttcacagacgtaccgcaaattaaattagttctgttgagctacttgtgtattggttatgtgtgttgttgttattggggaatcttgtcactccttaatagcatttttaggatgccattgggcgtctacaattataaaatctccgttcaggagttacgttatatgaatgctaatggcttgcgcccacctagaaatagttttgaggccctgatgcttaattttaagctgttgggaattggtggtgtgccagtcattgaagtatctcaaattcaatcaagattgacggatgttaaatgtgctaatgttgtgttgcttaattgcctccagcacttgcatattgcatctaattctaagttgtggcagtattgtagtactttgcacaatgaaatactggctacatctgatttgagcgtggccttcgataagttggctcaactcttagttgttttatttgctaatccagcagcagtggatagcaagtgccttgcaagtattgaagaagtgagcgatgattacgttcgcgacaatactgtcttgcaagccttacagagtgaatttgttaatatggctagcttcgttgagtatgaacttgctaagaagaatctagatgaggctaaggctagcggctctgccaatcaacagcagattaagcagctagagaaggcgtgtaatattgctaagtcagcatatgagcgcgacagagctgttgctcgtaagctggaacgtatggctgatttagctcttacaaacatgtataaagaagctagaattaatgataagaagagtaaggtagtgtctgcattgcaaaccatgctctttagtatggtgcgtaagctagataaccaagctcttaattctattttagacaacgcagttaagggttgtgtacctttgaatgcaataccatcattgacttcgaacactctgactataatagtgccagataagcaggtttttgatcaggttgtggataatgtgtatgtcacctatgctgggaatgtatggcatatacagtttattcaagatgctgatggtgctgttaaacaattgaatgagatagatgttaattcaacctggcctctagtcattgctgcaaataggcataatgaagtgtctactgttgttttgcagaacaatgagttgatgcctcagaagttgagaactcaggttgtcaatagtggctcagatatgaattgtaatactcctacccagtgttactataatactactggcacgggtaagattgtgtatgctatacttagtgactgtgacggcctgaagtacactaagatagtaaaagaagatggaaattgtgttgttttggaattggatcctccctgtaagttttctgttcaggatgtgaagggccttaaaattaagtacctttactttgtgaaggggtgtaatacactggctagaggctgggttgtaggcaccttatcctcgacagtgagattgcaggcgggtacggcaactgagtatgcctccaactctgcaatactgtcgctgtgtgcgttttctgtagatcctaagaaaacgtacttggattatataaaacagggtggagttcccgttactaattgtgttaagatgttatgtgaccatgctggcactggtatggccattactattaagccggaggcaaccactaatcaggattcttatggtggtgcttccgtttgtatatattgccgctcgcgtgttgaacatccagatgttgatggattgtgcaaattacgcggcaagtttgtccaagtgcccttaggcataaaagatcctgtgtcatatgtgttgacgcatgatgtttgtcaggtttgtggcttttggcgagatggtagctgttcctgtgtaggcacaggctcccagtttcagtcaaaagacacgaactttttaaacggattcggggtacaagtgtaaatgcccgtcttgtaccctgtgccagtggcttggacactgatgttcaattaagggcatttgacatttgtaatgctaatcgagctggcattggtttgtattataaagtgaattgctgccgcttccagcgtgtagatgaggacggcaacaagttggataagttctttgttgttaaaagaactaatttagaagtgtataacaaggagaaagaatgctatgagttgacaaaagaatgcggtgttgtggctgaacacgagttcttcacatttgatgtggagggaagtcgggtaccacacatagtccgtaaagatctttcaaagtttactatgttagatctttgctatgcattgcgtcattttgaccgcaatgattgttcaactcttaaggaaattctccttacatatgctgagtgtgaagagtcctacttccaaaagaaggactggtatgattttgttgagaatcctgatataattaatgtgtacaagaagcttggtcctatatttaatagagccctgcttaacactgccaagtttgcagacgcattagtggaggcaggcttagtaggtgttttaacacttgataatcaagatttatatggtcaatggtatgactttggagattttgtcaagacagtacctggttgtggtgttgccgtggcagactcttattattcatatatgatgccaatgctgactatgtgtcatgcgttggatagtgagttgtttgttaatggtacttatagggagtttgaccttgttcagtatgattttactgatttcaagctagagctgttcactaagtattttaagcattggagtatgacctaccacccgaacacctgtgagtgcgaggatgacaggtgcattattcattgcgccaattttaatatacttttcagcatggtcttacctaagacctgttttgggcctcttgttaggcagatatttgtggatggtgttcctttcgttgtgtcgatcggttaccattataaagaattaggtgttgttatgaatatggatgtggatacacatcgttatcgcttgtctcttaaggacttgcttttgtatgctgcagaccctgcccttcatgtggcgtctgctagtgcactgcttgatttgcgcacatgttgttttagcgttgcagctattacaagtggcgtaaaatttcaaacagttaaacctggaaattttaatcaggatttctacgagtttattttgagtaaaggcctgcttaaagaggggagctccgttgatttgaagcacttcttctttacgcaggatggtaatgctgctattactgattacaattactacaagtataatctacccaccatggtggatattaagcagttgttgtttgttttagaagttgttaataagtacttcgagatctatgagggtgggtgtatacccgcaacacaggtcattgttaataattatgacaagagtgctggctatccatttaataaatttggaaaggccaggctctattatgaggcattatcatttgaggagcaggatgaaatttatgcgtataccaaacgcaatgtcctgccgaccctaactcaaatgaatcttaaatatgctattagtgctaagaatagggcccgcaccgttgctggtgtctctattctcagtactatgactggcagaatgtttcatcaaaagtgtctaaagagtatagcagctactcgcggtgttcctgtagttataggcaccacgaagttctatggcggttgggatgatatgttacgccgccttattaaagatgttgatagtcctgtactcatgggttgggactatcctaaatgtgatcgtgctatgccaaacatactgcgtattgttagtagtttggtgctagcccgtaaacatgattcgtgctgttcgcatacggatagattctatcgtcttgcgaacgagtgcgcccaagttttgagtgaaattgttatgtgtggtggttgttattatgttaaaccaggtggcactagtagtggggatgcaaccactgcttttgctaattctgtgtttaacatttgtcaagctgtttccgccaatgtatgctcgcttatggcatgcaatggacacaaaattgaagatttgagtatacgcgagttacaaaagcgcctatactctaatgtctatcgtgcggaccatgttgaccccgcatttgttagtgagtattatgagtttttaaacaagcattttagtatgatgattttgagtgatgatggtgttgtgtgttataattcagagtttgcgtccaagggttatattgctaatataagtgcctttcaacaggtattatattatcaaaacaacgtgtttatgtctgaggccaaatgttgggtagaaacagacatcgaaaagggaccgcatgaattttgttctcaacatacaatgctagtcaagatggatggtgatgaagtctaccttccataccctgatccttcgagaatcttaggagcaggctgttttgttgatgatttactcaagactgatagcgttctcttgatagagcgtttcgtaagtcttgcaattgatgcttatcctttagtataccatgagaacccagagtatcaaaatgtgttccgggtatatttagaatacatcaagaagctgtacaatgatctcggtaatcagatcctggacagctacagtgttattttaagtacttgtgatggtcaaaagtttactgacgagacgttttacaagaacatgtatttaagaagtgcagtgctgcaaagcgttggtgcctgcgttgtctgtagttctcaaacatcattacgttgtggcagttgcatacgcaagcctttgctgtgttgcaaatgcgcctatgatcatgttatgtccactgatcataaatatgtcctgagtgtgtcaccatatgtgtgtaattcaccgggatgtgatgtaaatgatgttaccaaattgtatttaggtggtatgtcatattattgtgaggaccataaaccacagtattcattcaaattggtgatgaatggtatggtttttggtttatataagcagtcttgtactggttcgccctacatagaggattttaataaaatcgctagttgcaaatggacagaagtcgatgattatgtgctagctaatgaatgcaccgaacgccttaaattgtttgccgcagaaacgcagaaggccacagaagaggcctttaagcaatgttatgcgtcagcaacgatccgtgagatcgtgagcgatcgggagttaattttatcttgggaaattggtaaagtccgcccgccacttaataaaaattacgtgttcaccggctaccattttactaataatggtaagacagttttaggtgagtatgtttttgataagagtgagttgactaatggtgtgtattatcgcgccacaaccacttataagttatctgtaggtgatgtgttcattttaacatcacacgcagtgtctagtttaagtgctcctacattagtaccgcaggagaattatactagcattcgttttgctagtgtttatagtgtgcctgagacgtttcagaataatgtgcctaattatcagcacattggaatgaagcgctattgtactgtacagggaccgcctggtactggtaagtcccatctagccattgggctagctgtttattattgtacagcgcgcgtggtgtataccgctgctagccatgctgcagttgacgcgctgtgtgaaaaggcacataaatttctcaacatcaacgactgcacgcgtattgttcctgcaaaggtgcgtgtagattgttatgataaattcaaggtcaatgacaccactcgcaagtatgtgtttactacaataaatgcattacctgagttggtgactgacattattgtcgttgatgaagttagtatgcttaccaactatgagctgtctgttattaacagtcgtgttagggctaagcattatgtgtatattggcgacccggcgcagttacctgcaccacgtgtgctactgaataagggaactctagaacctagatattttaattccgttaccaagctaatgtgttgtttgggtccagatattttcttgggcacctgttatagatgccctaaggagattgtggatacggtgtcagccttggtttataataataagctgaaggctaaaaatgataatagctccatgtgctttaaggtttattataagggccagactacacatgagagttctagtgctgttaatatgcagcaaatacatttaatttccaagtttctgaaggcaaaccccagttggagtaacgccgtatttattagtccttataactcgcagaactatgttgctaagagagtcttgggattacaaacccagacagtagactcagcgcagggttctgaatatgattttgttatctactcacagactgcggaaacagcgcattctgtcaatgtaaatagattcaatgttgctattacacgtgctaagaagggtattctctgtgtcatgagtagtatgcaattatttgagtctcttaattttactacactgacgttggataagattaacaatccacgattacagtgtactacaaatttgtttaaggattgtagcaggagctatgtaggatatcacccagcccatgcaccatcctttttggcagttgatgacaaatataaggtaggcggtgatttagccgtttgccttaatgttgctgattctgctgtcacttattcgcggcttatatcactcatgggattcaagcttgacttgacccttgatggttattgtaagctgtttataactagagatgaagctatcaaacgtgttagagcctgggttggcttcgatgcagaaggtgcccatgcgatacgtgatagcattgggacaaatttcccattacaattaggcttttcgactggaattgattttgttgtcgaagccactggaatgtttgctgagagagatggttatgtctttaaaaaggcagccgcacgagctcctcctggcgaacaatttaaacaccttatcccacttatgtcaagagggcagaaatgggatgtggttcgcattagaatagtacaaatgttgtcagaccacctagtggatttggcagacagtgttgtacttgtgacgtgggctgccagctttgagctcacatgtttgcgatatttcgctaaagttggaagagaagttgtgtgtagtgtctgcaccaagcgtgcgacatgttttaattctagaactggatactatggatgctggcgacatagttattcctgtgattacctgtacaacccactaatagttgacattcaacagtggggatatacaggatctttaactagcaatcatgatcctatttgcagcgtgcataagggtgctcatgttgcatcatctgatgctatcatgacccggtgtctagctgttcatgattgcttttgtaagtctgttaattggaatttagaataccccattatttcaaatgaggtcagtgttaatacctcctgcaggttattgcagcgcgtaatgtttagggctgcgatgctatgcaataggtatgatgtgtgttatgacattggcaaccctaaaggtcttgcctgtgtcaaaggatatgattttaagttctatgacgcctcccctgttgttaagtctgttaaacagtttgtttacaaatacgaggcacataaagatcaatttttagatggtttgtgtatgttttggaactgcaatgtggataagtatccagcgaatgcagttgtgtgtaggtttgacacgcgtgtgttgaacaaattaaatctccctggctgtaatggtggcagtttgtatgttaacaaacatgcattccacaccagtccctttacccgggctgccttcgagaatttgaagcctatgcctttcttttattattcagatacgccctgtgtgtatatggaaggcatggaatctaagcaggtcgattatgtcccattgagaagcgctacatgcatcacaagatgcaatttaggtggcgctgtttgtttaaaacatgctgaggagtatcgtgagtaccttgagtcttacaatacggcaaccacagcgggttttactttttgggtctataagacttttgatttttacaacctttggaatacttttactaggctccaaagtttagaaaatgtagtgtataacctggtcaacgctggacactttgatggccgggcgggtgaactgccttgtgctgttataggtgagaaagtcattgccaagattcaaaatgaggatgtcgtggtctttaaaaataacacgccattccccactaatgtggctgtcgaattatttgctaagcgcagtattcggccccaccccgagcttaagctctttagaaatttgaatattgacgtgtgctggagtcacgtcctttgggattatgctaaggatagtgtgttttgcagttcgacgtataaggtctgcaaatacacagatttacagtgcattgaaagcttgaatgtactttttgatggtcgtgataatggtgctcttgaagcttttaagaagtgccggaatggcgtctacattaacacgacaaaaattaaaagtctgtcgatgattaaaggcccacaacgtgccgatttgaatggcgtagttgtggagaaagttggagattctgatgtggaattttggtttgctgtgcgtaaagacggtgacgatgttatcttcagccgtacagggagccttgaaccgagccattaccggagcccacaaggtaatccgggtggtaatcgcgtgggtgatctcagcggtaatgaagctctagcgcgtggcactatctttactcaaagcagattattatcttctttcacacctcgatcagagatggagaaagattttatggatttagatgatgatgtgttcattgcaaaatatagtttacaggactacgcgtttgaacacgttgtttatggtagttttaaccagaagattattggaggtttgcatttgcttattggcttagcccgtaggcagcaaaaatccaatctggtaattcaagagttcgtgacatacgactctagcattcattcgtactttatcactgacgagaacagtggtagtagtaagagtgtgtgcactgttattgatttattgttagatgattttgtggacattgtaaagtccctgaatctaaagtgtgtgagtaaggttgttaatgttaatgtggattttaaggacttccagtttatgttgtggtgcaatgaggagaaggtcatgactttctatcctcgtttgcaggctgctgctgactggaaacctggttatgttatgcctgtcttatataagtatttggaatcgcctctggaaagagtaaacctctggaattatggcaagccgattactttacctacaggatgtatgatgaatgttgctaagtatactcaattatgtcaatatttgagcactacaacattagcagttccggctaatatgcgtgtcttacaccttggtgccggttcggataagggtgttgcccctgggtctgcagttcttaggcagtggctaccagcgggaagtattcttgtagataatgatgtgaatccatttgtgagtgacagtgtcgcctcatattatggaaattgtataaccttaccctttgattgtcagtgggatctgataatttctgatatgtacgaccctcttactaagaacattggggagtacaacgtgagtaaagatggattctttacttacctctgtcatttaattcgtgacaagttggctctgggtggcagtgttgccataaaaataacagagttttcttggaacgctgagttatatagtttaatggggaagtttgcgttctggacaatcttttgcaccaacgtaaacgcctcttcaagtgaaggatttttgattggcataaattggttgaataagacccgtaccgaaattgacggtaaaaccatgcatgccaattatctgttttggagaaatagtacaatgtggaatggaggggcttacagtctctttgacatgagtaagttccctttgaaagcggctggtacggctgttgttagccttaaaccagaccaaataaatgacttagtcctctccttgattgagaagggcaagttattagtgcgtgatacacgcaaagaagtttttgttggcgatagcctagtaaatgtcaaataa

SEQ ID NO: 31 - protein, 4470 aa, Artificial Sequence
  Synthetic_Replicative_Polyprotein_1a
MAKMGKYGLGFKWAPEFPWMLPNASEKLGNPERSEEDGFCPSAAQEPKVKGKTLVNHVRVNCSRLPALECCVQSAIIRDIFVDEDPQKVEASTMMALQFGSAVLVKPSKRLSIQAWTNLGVLPKTAAMGLFKRVCLCNTRECSCDAHVAFHLFTVQPDGVCLGNGRFIGWFVPVTAIPEYAKQWLQPWSILLRKGGNKGSVTSGHFRRAVTMPVYDFNVEDACEEVHLNPKGKYSCKAYALLKGYRGVKPILFVDQYGCDYTGCLAKGLEDYGDLTLSEMKELFPVWRDSLDSEVLVAWHVDRDPRAAMRLQTLATVRCIDYVGQPTEDVVDGDVVVREPAHLLAANAIVKRLPRLVETMLYTDSSVTEFCYKTKLCECGFITQFGYVDCCGDTCDFRGWVAGNMMDGFPCPGCTKNYMPWELEAQSSGVIPEGGVLFTQSTDTVNRESFKLYGHAVVPFGSAVYWSPCPGMWLPVIWSSVKSYSGLTYTGVVGCKAIVQETDAICRSLYMDYVQHKCGNLEQRAILGLDDVYHRQLLVNRGDYSLLLENVDLFVKRRAEFACKFATCGDGLVPLLLDGLVPRSYYLIKSGQAFTSMMVNFSHEVTDMCMDMALLFMHDVKVATKYVKKVTGKLAVRFKALGVAVVRKITEWFDLAVDIAASAAGWLCYQLVNGLFAVANGVITFVQEVPELVKNFVDKFKAFFKVLIDSMSVSILSGLTVVKTASNRVCLAGSKVYEVVQKSLSAYVMPVGCSEATCLVGEIEPAVFEDDVVDVVKAPLTYQGCCKPPTSFEKICIVDKLYMAKCGDQFYPVVVDNDTVGVLDQCWRFPCAGKKVEFNDKPKVRKIPSTRKIKITFALDATFDSVLSKACSEFEVDKDVTLDELLDVVLDAVESTLSPCKEHDVIGTKVCALLDRLAGDYVYLFDEGGDEVIAPRMYCSFSAPDDEDCVAADVVDADENQDDDAEDSAVLVADTQEEDGVAKGQVEADSEICVAHTGSQEELAEPDAVGSQTPIASAEETEVGEASDREGIAEAKATVCADAVDACPDQVEAFEIEKVEDSILDELQTELNAPADKTYEDVLAFDAVCSEALSAFYAVPSDETHFKVCGFYSPAIERTNCWLRSTLIVMQSLPLEFKDLEMQKLWLSYKAGYDQCFVDKLVKSVPKSIILPQGGYVADFAYFFLSQCSFKAYANWRCLECDMELKLQGLDAMFFYGDVVSHMCKCGNSMTLLSADIPYTLHFGVRDDKFCAFYTPRKVFRAACAVDVNDCHSMAVVEGKQIDGKVVTKFIGDKFDFMVGYGMTFSMSPFELAQLYGSCITPNVCFVKGDVIKVVRLVNAEVIVNPANGRMAHGAGVAGAIAEKAGSAFIKETSDMVKAQGVCQVGECYESAGGKLCKKVLNIVGPDARGHGKQCYSLLERAYQHINKCDNVVTTLISAGIFSVPTDVSLTYLLGVVTKNVILVSNNQDDFDVIEKCQVTSVAGTKALSLQLAKNLCRDVKFVTNACSSLFSESCFVSSYDVLQEVEALRHDIQLDDDARVFVQANMDCLPTDWRLVNKFDSVDGVRTIKYFECPGGIFVSSQGKKFGYVQNGSFKEASVSQIRALLANKVDVLCTVDGVNFRSCCVAEGEVFGKTLGSVFCDGINVTKVRCSAIYKGKVFFQYSDLSEADLVAVKDAFGFDEPQLLKYYTMLGMCKWPVVVCGNYFAFKQSNNNCYINVACLMLQHLSLKFPKWQWQEAWNEFRSGKPLRFVSLVLAKGSFKFNEPSDSIDFMRVVLREADLSGATCNLEFVCKCGVKQEQRKGVDAVMHFGTLDKGDLVRGYNIACTCGSKLVHCTQFNVPFLICSNTPEGRKLPDDVVAANIFTGGSVGHYTHVKCKPKYQLYDACNVNKVSEAKGNFTDCLYLKNLKQTFSSVLTTFYLDDVKCVEYKPDLSQYYCESGKYYTKPIIKAQFRTFEKVDGVYTNFKLVGHSIAEKLNAKLGFDCNSPFVEYKITEWPTATGDVVLASDDLYVSRYLSGCITFGKPVVWLGHEEASLKSLTYFNRPSVVCENKFNVLPVDVSEPTDKGPVPAAVLVTGVPGADASAGAGIAKEQKACASASVEDQVVTEVRQEPSVSAADVKEVKLNGVKKPVKVEGSVVVNDPTSETKVVKSLSIVDVYDMFLTGCKYVVWTANELSRLVNSPTVREYVKWGMGKIVTPAKLLLLRDEKQEFVAPKVVKAKAIACYCAVKWFLLYCFSWIKFNTDNKVIYTTEVASKLTFKLCCLAFKNALQTFNWSVVSRGFFLVATVFLLWFNFLYANVILSDFYLPNIGPLPTFVGQIVAWFKTTFGVSTICDFYQVTDLGYRSSFCNGSMVCELCFSGFDMLDNYDAINVVQHVVDRRLSFDYISLFKLVVELVIGYSLYTVCFYPLFVLIGMQLLTTWLPEFFMLETMHWSARLFVFVANMLPAFTLLRFYIVVTAMYKVYCLCRHVMYGCSKPGCLFCYKRNRSVRVKCSTVVGGSLRYYDVMANGGTGFCTKHQWNCLNCNSWKPGNTFITHEAAADLSKELKRPVNPTDSAYYSVTEVKQVGCSMRLFYERDGQRVYDDVNASLFVDMNGLLHSKVKGVPETHVVVVENEADKAGFLGAAVFYAQSLYRPMLMVEKKLITTANTGLSVSRTMFDLYVDSLLNVLDVDRKSLTSFVNAAHNSLKEGVQLEQVMDTFIGCARRKCAIDSDVETKSITKSVMSAVNAGVDFTDESCNNLVPTYVKSDTIVAADLGVLIQNNAKHVQANVAKAANVACIWSVDAFNQLSADLQHRLRKACSKTGLKIKLTYNKQEANVPILTTPFSLKGGAVFSRMLQWLFVANLICFIVLWALMPTYAVHKSDMQLPLYASFKVIDNGVLRDVSVTDACFANKFNQFDQWYESTFGLAYYRNSKACPVVVAVIDQDIGHTLFNVPTTVLRYGFHVLHFITHAFATDSVQCYTPHMQIPYDNFYASGCVLSSLCTMLAHADGTPHPYCYTGGVMHNASLYSSLAPHVRYNLASSNGYIRFPEVVSEGIVRVVRTRSMTYCRVGLCEEAEEGICFNFNRSWVLNNPYYRAMPGTFCGRNAFDLIHQVLGGLVRPIDFFALTASSVAGAILAIIVVLAFYYLIKLKRAFGDYTSVVVINVIVWCINFLMLFVFQVYPTLSCLYACFYFYTTLYFPSEISVVMHLQWLVMYGAIMPLWFCIIYVAVVVSNHALWLFSYCRKIGTEVRSDGTFEEMALTTFMITKESYCKLKNSVSDVAFNRYLSLYNKYRYFSGKMDTAAYREAACSQLAKAMETFNHNNGNDVLYQPPTASVTTSFLQSGIVKMVSPTSKVEPCIVSVTYGNMTLNGLWLDDKVYCPRHVICSSADMTDPDYPNLLCRVTSSDFCVMSGRMSLTVMSYQMQGCQLVLTVTLQNPNTPKYSFGVVKPGETFTVLAAYNGRPQGAFHVTLRSSHTIKGSFLCGSCGSVGYVLTGDSVRFVYMHQLELSTGCHTGTDFSGNFYGPYRDAQVVQLPVQDYTQTVNVVAWLYAAIFNRCNWFVQSDSCSLEEFNVWAMTNGFSSIKADLVLDALASMTGVTVEQVLAAIKRLHSGFQGKQILGSCVLEDELTPSDVYQQLAGVKLQSKRTRVIKGTCCWILASTFLFCSIISAFVKWTMFMYVTTHMLGVTLCALCFVSFAMLLIKHKHLYLTMYIMPVLCTLFYTNYLVVYKQSFRGLAYAWLSHFVPAVDYTYMDEVLYGVVLLVAMVFVTMRSINHDVFSIMFLVGRLVSLVSMWYFGANLEEEVLLFLTSLFGTYTWTTMLSLATAKVIAKWLAVNVLYFTDVPQIKLVLLSYLCIGYVCCCYWGILSLLNSIFRMPLGVYNYKISVQELRYMNANGLRPPRNSFEALMLNFKLLGIGGVPVIEVSQIQSRLTDVKCANVVLLNCLQHLHIASNSKLWQYCSTLHNEILATSDLSVAFDKLAQLLVVLFANPAAVDSKCLASIEEVSDDYVRDNTVLQALQSEFVNMASFVEYELAKKNLDEAKASGSANQQQIKQLEKACNIAKSAYERDRAVARKLERMADLALTNMYKEARINDKKSKVVSALQTMLFSMVRKLDNQALNSILDNAVKGCVPLNAIPSLTSNTLTIIVPDKQVFDQVVDNVYVTYAGNVWHIQFIQDADGAVKQLNEIDVNSTWPLVIAANRHNEVSTVVLQNNELMPQKLRTQVVNSGSDMNCNTPTQCYYNTTGTGKIVYAILSDCDGLKYTKIVKEDGNCVVLELDPPCKFSVQDVKGLKIKYLYFVKGCNTLARGWVVGTLSSTVRLQAGTATEYASNSAILSLCAFSVDPKKTYLDYIKQGGVPVTNCVKMLCDHAGTGMAITIKPEATTNQDSYGGASVCIYCRSRVEHPDVDGLCKLRGKFVQVPLGIKDPVSYVLTHDVCQVCGFWRDGSCSCVGTGSQFQSKDTNFLNGFGVQV

SEQ ID NO: 32 - protein, 2714 aa, Artificial Sequence
  Synthetic_Replicative_Polyprotein1ab
RIRGTSVNARLVPCASGLDTDVQLRAFDICNANRAGIGLYYKVNCCRFQRVDEDGNKLDKFFVVKRTNLEVYNKEKECYELTKECGVVAEHEFFTFDVEGSRVPHIVRKDLSKFTMLDLCYALRHFDRNDCSTLKEILLTYAECEESYFQKKDWYDFVENPDIINVYKKLGPIFNRALLNTAKFADALVEAGLVGVLTLDNQDLYGQWYDFGDFVKTVPGCGVAVADSYYSYMMPMLTMCHALDSELFVNGTYREFDLVQYDFTDFKLELFTKYFKHWSMTYHPNTCECEDDRCIIHCANFNILFSMVLPKTCFGPLVRQIFVDGVPFVVSIGYHYKELGVVMNMDVDTHRYRLSLKDLLLYAADPALHVASASALLDLRTCCFSVAAITSGVKFQTVKPGNFNQDFYEFILSKGLLKEGSSVDLKHFFFTQDGNAAITDYNYYKYNLPTMVDIKQLLFVLEVVNKYFEIYEGGCIPATQVIVNNYDKSAGYPFNKFGKARLYYEALSFEEQDEIYAYTKRNVLPTLTQMNLKYAISAKNRARTVAGVSILSTMTGRMFHQKCLKSIAATRGVPVVIGTTKFYGGWDDMLRRLIKDVDSPVLMGWDYPKCDRAMPNILRIVSSLVLARKHDSCCSHTDRFYRLANECAQVLSEIVMCGGCYYVKPGGTSSGDATTAFANSVFNICQAVSANVCSLMACNGHKIEDLSIRELQKRLYSNVYRADHVDPAFVSEYYEFLNKHFSMMILSDDGVVCYNSEFASKGYIANISAFQQVLYYQNNVFMSEAKCWVETDIEKGPHEFCSQHTMLVKMDGDEVYLPYPDPSRILGAGCFVDDLLKTDSVLLIERFVSLAIDAYPLVYHENPEYQNVFRVYLEYIKKLYNDLGNQILDSYSVILSTCDGQKFTDETFYKNMYLRSAVLQSVGACVVCSSQTSLRCGSCIRKPLLCCKCAYDHVMSTDHKYVLSVSPYVCNSPGCDVNDVTKLYLGGMSYYCEDHKPQYSFKLVMNGMVFGLYKQSCTGSPYIEDFNKIASCKWTEVDDYVLANECTERLKLFAAETQKATEEAFKQCYASATIREIVSDRELILSWEIGKVRPPLNKNYVFTGYHFTNNGKTVLGEYVFDKSELTNGVYYRATTTYKLSVGDVFILTSHAVSSLSAPTLVPQENYTSIRFASVYSVPETFQNNVPNYQHIGMKRYCTVQGPPGTGKSHLAIGLAVYYCTARVVYTAASHAAVDALCEKAHKFLNINDCTRIVPAKVRVDCYDKFKVNDTTRKYVFTTINALPELVTDIIVVDEVSMLTNYELSVINSRVRAKHYVYIGDPAQLPAPRVLLNKGTLEPRYFNSVTKLMCCLGPDIFLGTCYRCPKEIVDTVSALVYNNKLKAKNDNSSMCFKVYYKGQTTHESSSAVNMQQIHLISKFLKANPSWSNAVFISPYNSQNYVAKRVLGLQTQTVDSAQGSEYDFVIYSQTAETAHSVNVNRFNVAITRAKKGILCVMSSMQLFESLNFTTLTLDKINNPRLQCTTNLFKDCSRSYVGYHPAHAPSFLAVDDKYKVGGDLAVCLNVADSAVTYSRLISLMGFKLDLTLDGYCKLFITRDEAIKRVRAWVGFDAEGAHAIRDSIGTNFPLQLGFSTGIDFVVEATGMFAERDGYVFKKAAARAPPGEQFKHLIPLMSRGQKWDVVRIRIVQMLSDHLVDLADSVVLVTWAASFELTCLRYFAKVGREVVCSVCTKRATCFNSRTGYYGCWRHSYSCDYLYNPLIVDIQQWGYTGSLTSNHDPICSVHKGAHVASSDAIMTRCLAVHDCFCKSVNWNLEYPIISNEVSVNTSCRLLQRVMFRAAMLCNRYDVCYDIGNPKGLACVKGYDFKFYDASPVVKSVKQFVYKYEAHKDQFLDGLCMFWNCNVDKYPANAVVCRFDTRVLNKLNLPGCNGGSLYVNKHAFHTSPFTRAAFENLKPMPFFYYSDTPCVYMEGMESKQVDYVPLRSATCITRCNLGGAVCLKHAEEYREYLESYNTATTAGFTFWVYKTFDFYNLWNTFTRLQSLENVVYNLVNAGHFDGRAGELPCAVIGEKVIAKIQNEDVVVFKNNTPFPTNVAVELFAKRSIRPHPELKLFRNLNIDVCWSHVLWDYAKDSVFCSSTYKVCKYTDLQCIESLNVLFDGRDNGALEAFKKCRNGVYINTTKIKSLSMIKGPQRADLNGVVVEKVGDSDVEFWFAVRKDGDDVIFSRTGSLEPSHYRSPQGNPGGNRVGDLSGNEALARGTIFTQSRLLSSFTPRSEMEKDFMDLDDDVFIAKYSLQDYAFEHVVYGSFNQKIIGGLHLLIGLARRQQKSNLVIQEFVTYDSSIHSYFITDENSGSSKSVCTVIDLLLDDFVDIVKSLNLKCVSKVVNVNVDFKDFQFMLWCNEEKVMTFYPRLQAAADWKPGYVMPVLYKYLESPLERVNLWNYGKPITLPTGCMMNVAKYTQLCQYLSTTTLAVPANMRVLHLGAGSDKGVAPGSAVLRQWLPAGSILVDNDVNPFVSDSVASYYGNCITLPFDCQWDLIISDMYDPLTKNIGEYNVSKDGFFTYLCHLIRDKLALGGSVAIKITEFSWNAELYSLMGKFAFWTIFCTNVNASSSEGFLIGINWLNKTRTEIDGKTMHANYLFWRNSTMWNGGAYSLFDMSKFPLKAAGTAVVSLKPDQINDLVLSLIEKGKLLVRDTRKEVFVGDSLVNVK

SEQ ID NO: 33 - DNA, 29844 bp, Artificial Sequence
  COVAX191_delta_N_RNA
gtataagagtgattggcgtccgtacgtaccctctcaactctaaaactcttgtagtttaaatctaatctaaactttataaacggcacttcctgcgtgtccatgcccgcgggcctggtcttgtcatagtgctgacatttgtagttccttgactttcgttctctgccagtgacgtgtccattcggcgccagcagcccacccataggttgcataatggcaaagatgggcaaatacggcctgggcttcaaatgggccccagaatttccatggatgcttccgaacgcatcggagaagttgggtaaccctgagaggtcagaggaggatgggttttgcccctctgctgcgcaagaaccgaaagttaaaggaaaaactttggttaatcacgtgagggtgaattgtagccggcttccagctttggaatgctgtgttcagtctgccataatccgtgatatttttgtagatgaggatccccagaaggtggaggcctcaactatgatggcattgcagttcggtagtgccgtcttggttaagccatccaagcgcttgtctattcaggcatggactaatttgggtgtgcttcccaaaacagctgccatggggttgttcaagcgcgtctgcctgtgtaacaccagggagtgctcttgtgacgcccacgtggcctttcacctttttacggtccaacccgatggtgtatgcctgggtaatggccgttttataggctggttcgttccagtcacagccataccggagtatgcgaagcagtggttgcaaccctggtccatccttcttcgtaagggtggtaacaaagggtctgtgacatccggccacttccgccgcgctgttaccatgcctgtgtatgactttaatgtagaggatgcttgtgaggaggttcatcttaacccgaagggtaagtactcctgcaaggcgtatgccctgctgaagggctatcgcggtgttaagcccatcctgtttgtggaccagtatggttgcgactatactggatgtctcgccaagggtcttgaggactatggcgatctcaccttgagtgagatgaaggagttgttccctgtgtggcgtgactccttggatagtgaagtccttgtggcttggcacgttgatcgagatcctcgggctgctatgcgtctgcagactcttgctactgtacgttgcattgattatgtgggccaaccgaccgaggatgtggtggatggagatgtggtagtgcgtgagcctgctcatcttctcgcagccaatgccattgttaaaagactcccccgtttggtggagactatgctgtatacggattcgtccgttacagaattctgttataaaaccaagctgtgtgaatgcggttttatcacgcagtttggctatgtggattgttgtggtgacacctgtgattttcgtgggtgggttgccggcaatatgatggatggctttccatgtccagggtgtaccaaaaattatatgccctgggaattggaggcccagtcatcaggtgttataccagaaggaggtgttctattcactcagagcactgatacagtgaatcgtgagtcctttaagctctacggtcatgctgttgtgccttttggttctgctgtgtattggagcccttgcccaggtatgtggcttccagtaatttggtcgtcggttaagtcatactctggtttgacttatacaggagtagttggttgtaaggcaattgttcaagagacagacgctatatgtcgttctctgtatatggattatgtccagcacaagtgtggcaatctcgagcagagagctatccttggattggacgatgtctatcatagacagttgcttgtgaataggggtgactatagtctcctccttgagaatgtggatttgtttgttaagcggcgcgctgaatttgcttgcaaattcgccacctgtggagatggtcttgtacccctcctactagatggtttagtgccccgcagttattatttgattaagagtggtcaagctttcacctctatgatggttaattttagccatgaggtgactgacatgtgtatggacatggctttattgttcatgcatgatgttaaagtggccactaagtatgttaagaaggttactggcaaactggccgtgcgctttaaagcgttgggtgtagccgttgtcagaaaaattactgaatggtttgatttagccgtggacattgctgctagtgccgctggatggctttgctaccagctggtaaatggcttatttgcagtggccaatggtgttataacctttgtacaggaggtgcctgagcttgtcaagaattttgttgacaagttcaaggcatttttcaaggttttgatcgactctatgtcggtttctatcttgtctggacttactgttgtcaagactgcctcaaatagggtgtgtcttgctggcagtaaggtttatgaagttgtgcagaaatctttgtctgcatatgttatgcctgtgggttgcagcgaagccacttgtttggtgggtgagattgaacctgcagtttttgaagatgatgttgttgatgtggttaaagccccattaacatatcaaggctgttgtaagccacccacttctttcgagaagatttgtattgtggataaattgtatatggccaagtgtggtgatcaattttaccctgtggttgttgataacgacactgttggcgtgttagatcagtgctggaggtttccctgtgcgggcaagaaagtcgagtttaacgacaagcccaaagtcaggaagataccctccacccgtaagattaagatcaccttcgcactggatgcgacctttgatagtgttctttcgaaggcgtgttcagagtttgaagttgataaagatgttacattggatgagctgcttgatgttgtgcttgacgcagttgagagtacgctcagcccttgtaaggagcatgatgtgataggcacaaaagtttgtgctttacttgataggttggcaggagattatgtctatctttttgatgagggaggcgatgaagtgatcgccccgaggatgtattgttccttttctgctcctgatgacgaggactgcgttgcagcggatgttgtagatgcagatgaaaaccaagatgatgatgccgaggactcagcagtccttgtcgctgatacccaagaagaggacggcgttgccaaggggcaggttgaggcggattcggaaatttgcgttgcgcatactggtagtcaagaagaattggctgagcctgatgctgtcggatctcaaactcccatcgcctctgctgaggaaaccgaagtcggagaggcaagcgacagggaagggattgctgaggcgaaggcaactgtgtgtgctgatgctgtagatgcctgccccgatcaagtggaggcatttgaaattgaaaaggtcgaggactctatcttggatgagcttcaaactgaacttaatgcgccagcggacaagacctatgaggatgtcttggcattcgatgccgtatgctcagaggcgttgtctgcattctatgctgtgccgagtgatgagacgcactttaaagtgtgtggattctattcgcctgctatagagcgcactaattgttggctgcgttctactttgatagtaatgcagagtctacctttggaatttaaagacttggagatgcaaaagctctggttgtcttacaaggccggctatgaccaatgctttgtggacaaactagttaagagcgtgcccaagtctattatccttccacaaggtggttatgtggcagattttgcctatttctttctaagccagtgtagctttaaagcttatgctaactggcgttgtttagagtgtgacatggagttaaagcttcaaggcttggacgccatgtttttctatggggacgttgtgtctcatatgtgcaagtgtggtaatagcatgaccttgttgtctgcagatataccctacactttgcattttggagtgcgagatgataagttttgcgctttttacacgccaagaaaggtctttagggctgcttgtgcggtagatgttaatgattgtcactctatggctgtagtagagggcaagcaaattgatggtaaagtggttaccaaatttattggtgacaaatttgattttatggtgggttacgggatgacatttagtatgtctccttttgaactcgcccagttatatggttcatgtataacaccaaatgtttgttttgttaaaggagatgttataaaggttgttcgcttagttaatgctgaagtcattgttaaccctgctaatgggcgtatggctcatggtgccggcgtcgccggcgccatagctgaaaaggcgggcagtgcttttattaaagaaacctccgatatggtgaaggctcagggcgtttgccaggttggtgaatgctatgaatctgccggtggtaagttatgtaaaaaggtgcttaacattgtagggccagatgcgcgagggcatggcaagcaatgctattcacttttagagcgtgcttatcagcatattaataagtgtgacaatgttgtcactactttaatttcggctggtatatttagtgtgcctactgatgtctccctaacttacttacttggtgtagtgacaaagaatgtcattcttgtcagtaacaaccaggatgattttgatgtgatagagaagtgtcaggtgacctccgttgctggtaccaaagcgctatcacttcaattggccaaaaatttgtgccgtgatgtaaagtttgtgacgaatgcatgtagttcgctttttagtgaatcttgctttgtctcaagctatgatgtgttgcaggaagttgaagcgctgcgacatgatatacaattggatgatgatgctcgtgtctttgtgcaggctaatatggactgtctgcccacagactggcgtctcgttaacaaatttgatagtgttgatggtgttagaaccattaagtattttgaatgcccgggcgggatttttgtatccagccagggcaaaaagtttggttatgttcagaatggttcatttaaggaggcgagtgttagccaaataagggctttactcgctaataaggttgatgtcttgtgtactgttgatggtgttaacttccgctcctgctgcgtagcagagggtgaagtttttggcaagacattaggttcagtcttttgtgatggcataaatgtcaccaaagttaggtgtagtgccatttacaagggtaaggttttctttcagtacagtgatttgtccgaggcagatcttgtggctgttaaagatgcctttggttttgatgaaccacaactgctgaagtactacactatgcttggcatgtgtaagtggccagtagttgtttgtggcaattattttgctttcaagcagtcaaataataattgctacatcaacgtggcatgtttaatgctgcaacacttgagtttaaagtttcctaagtggcaatggcaagaggcttggaacgagttccgctctggtaaaccactaaggtttgtgtccttggtattagcaaagggcagctttaaatttaatgaaccttctgattctatcgattttatgcgtgtggtgctacgtgaagcagatttgagtggtgccacgtgcaatttggaatttgtttgtaaatgtggtgtgaagcaagagcagcgcaaaggtgttgacgctgttatgcattttggtacgttggataaaggtgatcttgtcaggggttataatatcgcatgtacgtgcggtagtaaacttgtgcattgcacccaatttaacgtaccatttttaatttgctccaacacaccagagggtaggaaactgcccgacgatgttgttgcagctaatatttttactggtggtagtgtgggccattacacgcatgtgaaatgtaaacccaagtaccagctttatgatgcttgtaatgttaataaggtttcggaggctaagggtaattttaccgattgcctctaccttaaaaatttaaagcaaaccttctcgtctgtgctgacgactttttatttagatgacgtaaagtgtgtggagtataagccagatttatcgcagtattactgtgagtctggtaaatattatacaaaacccattattaaggcccaatttagaacatttgagaaggttgatggtgtctataccaactttaaattggtgggacatagtattgctgaaaaactcaatgctaagctgggatttgattgtaattctccctttgtggagtataaaattacagagtggccaacagctactggagatgtggtgttggctagtgatgatttgtatgtaagtcggtacttaagcgggtgcattacttttggtaaaccggttgtctggcttggccatgaggaagcatcgctgaaatctctcacatattttaatagacctagtgtcgtttgtgaaaataaatttaacgtgttgcccgttgatgtcagtgaacccacggacaaggggcctgtgcctgctgcagtccttgttaccggcgtccctggagctgatgcgtcagctggtgccggtattgccaaggagcaaaaagcctgtgcttctgctagtgtggaggatcaggttgttacggaggttcgtcaagagccatctgtttcagctgctgatgtcaaagaggttaaattgaatggtgttaaaaagcctgttaaggtggaaggtagtgtggttgttaatgatcccactagcgaaaccaaagttgttaaaagtttgtctattgttgatgtctatgatatgttcctgacagggtgtaagtatgtggtttggactgctaatgagttgtctcgactagtaaattcaccgactgttagggagtatgtgaagtggggtatgggaaagattgtaacacccgctaagttgttgttgttaagagatgagaagcaagagttcgtagcgccaaaagtagtcaaggcgaaagctattgcctgctattgtgctgtgaagtggtttctcctctattgttttagttggataaagtttaatactgacaataaggttatatacaccacagaagtagcttcaaagcttactttcaagttgtgctgtttggcctttaagaatgccttacagacgtttaattggagcgttgtgtctaggggctttttcctagttgcaacggtctttttactctggtttaactttttgtatgctaatgttattttgagtgacttctatttgcctaatattgggcctctccctacgtttgtgggacagatagttgcgtggtttaagactacatttggtgtgtcaaccatctgtgatttctaccaggtgacggatttgggctatagaagttcgttttgtaatggaagtatggtatgtgaactatgcttctcaggttttgatatgctggacaactatgatgctataaatgttgttcaacacgttgtagataggcgtttgtcctttgactatattagcctatttaaactggtagttgagcttgtaatcggctactctctttatactgtgtgcttctacccactgtttgtccttattggaatgcagttattgaccacatggttgcctgaattctttatgctggagactatgcattggagtgctcgtttgtttgtgtttgttgccaatatgcttccagcttttacgttactgcgattttacatcgtggtgacagctatgtataaggtctattgtctttgtagacatgttatgtatggatgtagtaagcctggttgcttgttttgttataagagaaaccgtagtgtccgtgttaagtgtagcaccgttgttggtggttcactacgctattacgatgtaatggctaacggcggcacaggtttctgtacaaagcaccagtggaactgtcttaattgcaattcctggaaaccaggcaatacattcataactcatgaagcagcggcggacctctctaaggagttgaaacgccctgtgaatccaacagattctgcttattactcggtcacagaggttaagcaggttggttgttccatgcgtttgttctacgagagagatggacagcgtgtttatgatgatgttaatgctagtttgtttgtggacatgaatggtctgctgcattctaaagttaaaggtgtgcctgaaacgcatgttgtggttgttgagaatgaagctgataaagctggttttctcggcgccgcagtgttttatgcacaatcgctctacagacctatgttgatggtggaaaagaaattaataactaccgccaacactggtttgtctgttagtcgaactatgtttgacctttatgtagattcattgctgaacgtcctcgacgtggatcgcaagagtctaacaagttttgtaaatgctgcgcacaactctctaaaggagggtgttcagcttgaacaagttatggatacctttattggctgtgcccgacgtaagtgtgctatagattctgatgttgaaaccaagtctattaccaagtccgtcatgtcggcagtaaatgctggcgttgattttacggatgagagttgtaataacttggtgcctacctatgttaaaagtgacactatcgttgcagccgatttgggtgttcttattcagaataatgctaagcatgtacaggctaatgttgctaaagccgctaatgtggcttgcatttggtctgtggatgcttttaaccagctatctgctgacttacagcataggctgcgaaaagcatgttcaaaaactggcttgaagattaagcttacttataataagcaggaggcaaatgttcctattttaactacaccgttctctcttaaagggggcgctgtttttagtagaatgttacaatggttgtttgttgctaatttgatttgtttcattgtgttgtgggcccttatgccaacatatgcagtgcacaaatcggatatgcagttgcctttatatgccagttttaaagttatagataacggtgtgctaagggatgtgtctgttactgacgcatgcttcgcaaacaaatttaatcaattcgaccaatggtatgagtctacttttggtcttgcttattaccgcaactctaaggcttgtcctgttgtggttgctgtaatagatcaagacattggccataccttatttaatgttcctaccacagttttaagatatggatttcatgtgttgcattttataacccatgcatttgctactgatagcgtgcagtgttacacgccacatatgcaaatcccctatgataatttctatgctagtggttgcgtgttgtcatccctctgtactatgcttgcgcatgcagatggaaccccgcatccttattgttatacagggggtgttatgcataatgcctctctgtatagttctttggctcctcatgtccgttataacctggctagttcaaatggttatatacgttttcccgaagtggttagtgaaggcattgtgcgtgttgtgcgcactcgctctatgacctactgcagggttggtttatgtgaggaggccgaggagggtatctgctttaattttaatcgttcatgggtattgaacaacccgtattatagggccatgcctggaactttttgtggtaggaatgcttttgatttaatacatcaagttttaggaggattagtgcggcctattgatttctttgccttaacggcgagttcagtggctggtgctatccttgcaattattgtcgttttggctttctattatttaatcaagcttaagcgtgcctttggtgactacactagtgttgtggttatcaatgtaattgtgtggtgtataaattttctgatgctttttgtgtttcaggtttatcccacattgtcttgtttatatgcttgtttctacttctacaccacgctttatttcccttcggagataagtgttgttatgcatttgcaatggcttgtcatgtatggtgctattatgcccttgtggttttgcattatttacgtggcagtcgttgtttcaaaccatgcattgtggttgttctcttactgccgcaaaattggtaccgaggttcgtagtgacggcacatttgaggaaatggcccttactacctttatgattactaaagaatcttattgtaagttgaaaaactctgtttctgatgttgcttttaacaggtacttgagtctttacaacaagtaccgttacttcagtggcaaaatggatactgccgcttatagagaggctgcctgttcacaactggcaaaggcaatggaaacatttaaccataataatggtaatgatgttctctatcagcctccaaccgcctctgttactacatcatttttacagtctggtatagtgaagatggtgtcgcccacctctaaagtggagccttgtattgttagtgttacttatggtaacatgacacttaatgggttgtggttggatgataaagtttattgcccaagacatgttatctgttcttcagctgacatgacagaccctgattatcctaatttgctttgtagagtgacatcaagtgatttttgtgttatgtctggtcgtatgagccttactgtaatgtcttatcaaatgcagggctgccaacttgttttgactgttacactgcaaaatcctaacacgcctaagtattccttcggtgttgttaagcctggtgagacatttactgtactggctgcatacaatggcagacctcaaggagccttccatgttacgcttcgtagtagccataccataaagggctcctttctatgtggatcctgcggttctgtaggatatgttttaactggcgatagtgtacgatttgtttatatgcatcagctagagttgagtactggttgtcataccggtactgactttagtgggaacttttatggtccctatagagatgcgcaagttgtacaattgcctgttcaggattatacgcagactgttaatgttgtagcttggctttatgctgctatttttaacagatgcaactggtttgtgcaaagtgatagttgttccctggaggagtttaatgtttgggctatgaccaatggttttagctcaatcaaagccgatcttgtcttggatgcgcttgcttctatgacaggcgttacagttgaacaggtgttggccgctattaagaggctgcattctggattccagggcaaacaaattttaggtagttgtgtgcttgaagatgagctgacaccaagtgatgtttatcaacaactagctggtgtcaagctacagtcaaagcgcacaagagttataaaaggtacatgttgctggatattggcttcaacgtttttgttctgtagcattatctcagcatttgtaaaatggactatgtttatgtatgttactacccatatgttgggagtgacattgtgtgcactttgttttgtaagctttgctatgttgttgatcaagcataagcatttgtatttaactatgtacatcatgcctgtgttatgcacactgttttacaccaactatttggttgtgtacaaacagagttttagaggtctagcttatgcttggctttcacactttgtccctgctgtagattatacatatatggatgaagttttatatggtgttgtgttgctagtagctatggtgtttgttaccatgcgtagcataaaccacgacgtcttttctattatgttcttggttggtagacttgtcagcctggtatccatgtggtattttggagccaatttagaggaagaggtactattgttcctcacatccctatttggcacgtacacatggactactatgttgtcattggctaccgctaaggttattgctaaatggttggctgtgaatgtcttgtacttcacagacgtaccgcaaattaaattagttctgttgagctacttgtgtattggttatgtgtgttgttgttattggggaatcttgtcactccttaatagcatttttaggatgccattgggcgtctacaattataaaatctccgttcaggagttacgttatatgaatgctaatggcttgcgcccacctagaaatagttttgaggccctgatgcttaattttaagctgttgggaattggtggtgtgccagtcattgaagtatctcaaattcaatcaagattgacggatgttaaatgtgctaatgttgtgttgcttaattgcctccagcacttgcatattgcatctaattctaagttgtggcagtattgtagtactttgcacaatgaaatactggctacatctgatttgagcgtggccttcgataagttggctcaactcttagttgttttatttgctaatccagcagcagtggatagcaagtgccttgcaagtattgaagaagtgagcgatgattacgttcgcgacaatactgtcttgcaagccttacagagtgaatttgttaatatggctagcttcgttgagtatgaacttgctaagaagaatctagatgaggctaaggctagcggctctgccaatcaacagcagattaagcagctagagaaggcgtgtaatattgctaagtcagcatatgagcgcgacagagctgttgctcgtaagctggaacgtatggctgatttagctcttacaaacatgtataaagaagctagaattaatgataagaagagtaaggtagtgtctgcattgcaaaccatgctctttagtatggtgcgtaagctagataaccaagctcttaattctattttagacaacgcagttaagggttgtgtacctttgaatgcaataccatcattgacttcgaacactctgactataatagtgccagataagcaggtttttgatcaggttgtggataatgtgtatgtcacctatgctgggaatgtatggcatatacagtttattcaagatgctgatggtgctgttaaacaattgaatgagatagatgttaattcaacctggcctctagtcattgctgcaaataggcataatgaagtgtctactgttgttttgcagaacaatgagttgatgcctcagaagttgagaactcaggttgtcaatagtggctcagatatgaattgtaatactcctacccagtgttactataatactactggcacgggtaagattgtgtatgctatacttagtgactgtgacggcctgaagtacactaagatagtaaaagaagatggaaattgtgttgttttggaattggatcctccctgtaagttttctgttcaggatgtgaagggccttaaaattaagtacctttactttgtgaaggggtgtaatacactggctagaggctgggttgtaggcaccttatcctcgacagtgagattgcaggcgggtacggcaactgagtatgcctccaactctgcaatactgtcgctgtgtgcgttttctgtagatcctaagaaaacgtacttggattatataaaacagggtggagttcccgttactaattgtgttaagatgttatgtgaccatgctggcactggtatggccattactattaagccggaggcaaccactaatcaggattcttatggtggtgcttccgtttgtatatattgccgctcgcgtgttgaacatccagatgttgatggattgtgcaaattacgcggcaagtttgtccaagtgcccttaggcataaaagatcctgtgtcatatgtgttgacgcatgatgtttgtcaggtttgtggcttttggcgagatggtagctgttcctgtgtaggcacaggctcccagtttcagtcaaaagacacgaactttttaaacggattcggggtacaagtgtaaatgcccgtcttgtaccctgtgccagtggcttggacactgatgttcaattaagggcatttgacatttgtaatgctaatcgagctggcattggtttgtattataaagtgaattgctgccgcttccagcgtgtagatgaggacggcaacaagttggataagttctttgttgttaaaagaactaatttagaagtgtataacaaggagaaagaatgctatgagttgacaaaagaatgcggtgttgtggctgaacacgagttcttcacatttgatgtggagggaagtcgggtaccacacatagtccgtaaagatctttcaaagtttactatgttagatctttgctatgcattgcgtcattttgaccgcaatgattgttcaactcttaaggaaattctccttacatatgctgagtgtgaagagtcctacttccaaaagaaggactggtatgattttgttgagaatcctgatataattaatgtgtacaagaagcttggtcctatatttaatagagccctgcttaacactgccaagtttgcagacgcattagtggaggcaggcttagtaggtgttttaacacttgataatcaagatttatatggtcaatggtatgactttggagattttgtcaagacagtacctggttgtggtgttgccgtggcagactcttattattcatatatgatgccaatgctgactatgtgtcatgcgttggatagtgagttgtttgttaatggtacttatagggagtttgaccttgttcagtatgattttactgatttcaagctagagctgttcactaagtattttaagcattggagtatgacctaccacccgaacacctgtgagtgcgaggatgacaggtgcattattcattgcgccaattttaatatacttttcagcatggtcttacctaagacctgttttgggcctcttgttaggcagatatttgtggatggtgttcctttcgttgtgtcgatcggttaccattataaagaattaggtgttgttatgaatatggatgtggatacacatcgttatcgcttgtctcttaaggacttgcttttgtatgctgcagaccctgcccttcatgtggcgtctgctagtgcactgcttgatttgcgcacatgttgttttagcgttgcagctattacaagtggcgtaaaatttcaaacagttaaacctggaaattttaatcaggatttctacgagtttattttgagtaaaggcctgcttaaagaggggagctccgttgatttgaagcacttcttctttacgcaggatggtaatgctgctattactgattacaattactacaagtataatctacccaccatggtggatattaagcagttgttgtttgttttagaagttgttaataagtacttcgagatctatgagggtgggtgtatacccgcaacacaggtcattgttaataattatgacaagagtgctggctatccatttaataaatttggaaaggccaggctctattatgaggcattatcatttgaggagcaggatgaaatttatgcgtataccaaacgcaatgtcctgccgaccctaactcaaatgaatcttaaatatgctattagtgctaagaatagggcccgcaccgttgctggtgtctctattctcagtactatgactggcagaatgtttcatcaaaagtgtctaaagagtatagcagctactcgcggtgttcctgtagttataggcaccacgaagttctatggcggttgggatgatatgttacgccgccttattaaagatgttgatagtcctgtactcatgggttgggactatcctaaatgtgatcgtgctatgccaaacatactgcgtattgttagtagtttggtgctagcccgtaaacatgattcgtgctgttcgcatacggatagattctatcgtcttgcgaacgagtgcgcccaagttttgagtgaaattgttatgtgtggtggttgttattatgttaaaccaggtggcactagtagtggggatgcaaccactgcttttgctaattctgtgtttaacatttgtcaagctgtttccgccaatgtatgctcgcttatggcatgcaatggacacaaaattgaagatttgagtatacgcgagttacaaaagcgcctatactctaatgtctatcgtgcggaccatgttgaccccgcatttgttagtgagtattatgagtttttaaacaagcattttagtatgatgattttgagtgatgatggtgttgtgtgttataattcagagtttgcgtccaagggttatattgctaatataagtgcctttcaacaggtattatattatcaaaacaacgtgtttatgtctgaggccaaatgttgggtagaaacagacatcgaaaagggaccgcatgaattttgttctcaacatacaatgctagtcaagatggatggtgatgaagtctaccttccataccctgatccttcgagaatcttaggagcaggctgttttgttgatgatttactcaagactgatagcgttctcttgatagagcgtttcgtaagtcttgcaattgatgcttatcctttagtataccatgagaacccagagtatcaaaatgtgttccgggtatatttagaatacatcaagaagctgtacaatgatctcggtaatcagatcctggacagctacagtgttattttaagtacttgtgatggtcaaaagtttactgacgagacgttttacaagaacatgtatttaagaagtgcagtgctgcaaagcgttggtgcctgcgttgtctgtagttctcaaacatcattacgttgtggcagttgcatacgcaagcctttgctgtgttgcaaatgcgcctatgatcatgttatgtccactgatcataaatatgtcctgagtgtgtcaccatatgtgtgtaattcaccgggatgtgatgtaaatgatgttaccaaattgtatttaggtggtatgtcatattattgtgaggaccataaaccacagtattcattcaaattggtgatgaatggtatggtttttggtttatataagcagtcttgtactggttcgccctacatagaggattttaataaaatcgctagttgcaaatggacagaagtcgatgattatgtgctagctaatgaatgcaccgaacgccttaaattgtttgccgcagaaacgcagaaggccacagaagaggcctttaagcaatgttatgcgtcagcaacgatccgtgagatcgtgagcgatcgggagttaattttatcttgggaaattggtaaagtccgcccgccacttaataaaaattacgtgttcaccggctaccattttactaataatggtaagacagttttaggtgagtatgtttttgataagagtgagttgactaatggtgtgtattatcgcgccacaaccacttataagttatctgtaggtgatgtgttcattttaacatcacacgcagtgtctagtttaagtgctcctacattagtaccgcaggagaattatactagcattcgttttgctagtgtttatagtgtgcctgagacgtttcagaataatgtgcctaattatcagcacattggaatgaagcgctattgtactgtacagggaccgcctggtactggtaagtcccatctagccattgggctagctgtttattattgtacagcgcgcgtggtgtataccgctgctagccatgctgcagttgacgcgctgtgtgaaaaggcacataaatttctcaacatcaacgactgcacgcgtattgttcctgcaaaggtgcgtgtagattgttatgataaattcaaggtcaatgacaccactcgcaagtatgtgtttactacaataaatgcattacctgagttggtgactgacattattgtcgttgatgaagttagtatgcttaccaactatgagctgtctgttattaacagtcgtgttagggctaagcattatgtgtatattggcgacccggcgcagttacctgcaccacgtgtgctactgaataagggaactctagaacctagatattttaattccgttaccaagctaatgtgttgtttgggtccagatattttcttgggcacctgttatagatgccctaaggagattgtggatacggtgtcagccttggtttataataataagctgaaggctaaaaatgataatagctccatgtgctttaaggtttattataagggccagactacacatgagagttctagtgctgttaatatgcagcaaatacatttaatttccaagtttctgaaggcaaaccccagttggagtaacgccgtatttattagtccttataactcgcagaactatgttgctaagagagtcttgggattacaaacccagacagtagactcagcgcagggttctgaatatgattttgttatctactcacagactgcggaaacagcgcattctgtcaatgtaaatagattcaatgttgctattacacgtgctaagaagggtattctctgtgtcatgagtagtatgcaattatttgagtctcttaattttactacactgacgttggataagattaacaatccacgattacagtgtactacaaatttgtttaaggattgtagcaggagctatgtaggatatcacccagcccatgcaccatcctttttggcagttgatgacaaatataaggtaggcggtgatttagccgtttgccttaatgttgctgattctgctgtcacttattcgcggcttatatcactcatgggattcaagcttgacttgacccttgatggttattgtaagctgtttataactagagatgaagctatcaaacgtgttagagcctgggttggcttcgatgcagaaggtgcccatgcgatacgtgatagcattgggacaaatttcccattacaattaggcttttcgactggaattgattttgttgtcgaagccactggaatgtttgctgagagagatggttatgtctttaaaaaggcagccgcacgagctcctcctggcgaacaatttaaacaccttatcccacttatgtcaagagggcagaaatgggatgtggttcgcattagaatagtacaaatgttgtcagaccacctagtggatttggcagacagtgttgtacttgtgacgtgggctgccagctttgagctcacatgtttgcgatatttcgctaaagttggaagagaagttgtgtgtagtgtctgcaccaagcgtgcgacatgttttaattctagaactggatactatggatgctggcgacatagttattcctgtgattacctgtacaacccactaatagttgacattcaacagtggggatatacaggatctttaactagcaatcatgatcctatttgcagcgtgcataagggtgctcatgttgcatcatctgatgctatcatgacccggtgtctagctgttcatgattgcttttgtaagtctgttaattggaatttagaataccccattatttcaaatgaggtcagtgttaatacctcctgcaggttattgcagcgcgtaatgtttagggctgcgatgctatgcaataggtatgatgtgtgttatgacattggcaaccctaaaggtcttgcctgtgtcaaaggatatgattttaagttctatgacgcctcccctgttgttaagtctgttaaacagtttgtttacaaatacgaggcacataaagatcaatttttagatggtttgtgtatgttttggaactgcaatgtggataagtatccagcgaatgcagttgtgtgtaggtttgacacgcgtgtgttgaacaaattaaatctccctggctgtaatggtggcagtttgtatgttaacaaacatgcattccacaccagtccctttacccgggctgccttcgagaatttgaagcctatgcctttcttttattattcagatacgccctgtgtgtatatggaaggcatggaatctaagcaggtcgattatgtcccattgagaagcgctacatgcatcacaagatgcaatttaggtggcgctgtttgtttaaaacatgctgaggagtatcgtgagtaccttgagtcttacaatacggcaaccacagcgggttttactttttgggtctataagacttttgatttttacaacctttggaatacttttactaggctccaaagtttagaaaatgtagtgtataacctggtcaacgctggacactttgatggccgggcgggtgaactgccttgtgctgttataggtgagaaagtcattgccaagattcaaaatgaggatgtcgtggtctttaaaaataacacgccattccccactaatgtggctgtcgaattatttgctaagcgcagtattcggccccaccccgagcttaagctctttagaaatttgaatattgacgtgtgctggagtcacgtcctttgggattatgctaaggatagtgtgttttgcagttcgacgtataaggtctgcaaatacacagatttacagtgcattgaaagcttgaatgtactttttgatggtcgtgataatggtgctcttgaagcttttaagaagtgccggaatggcgtctacattaacacgacaaaaattaaaagtctgtcgatgattaaaggcccacaacgtgccgatttgaatggcgtagttgtggagaaagttggagattctgatgtggaattttggtttgctgtgcgtaaagacggtgacgatgttatcttcagccgtacagggagccttgaaccgagccattaccggagcccacaaggtaatccgggtggtaatcgcgtgggtgatctcagcggtaatgaagctctagcgcgtggcactatctttactcaaagcagattattatcttctttcacacctcgatcagagatggagaaagattttatggatttagatgatgatgtgttcattgcaaaatatagtttacaggactacgcgtttgaacacgttgtttatggtagttttaaccagaagattattggaggtttgcatttgcttattggcttagcccgtaggcagcaaaaatccaatctggtaattcaagagttcgtgacatacgactctagcattcattcgtactttatcactgacgagaacagtggtagtagtaagagtgtgtgcactgttattgatttattgttagatgattttgtggacattgtaaagtccctgaatctaaagtgtgtgagtaaggttgttaatgttaatgtggattttaaggacttccagtttatgttgtggtgcaatgaggagaaggtcatgactttctatcctcgtttgcaggctgctgctgactggaaacctggttatgttatgcctgtcttatataagtatttggaatcgcctctggaaagagtaaacctctggaattatggcaagccgattactttacctacaggatgtatgatgaatgttgctaagtatactcaattatgtcaatatttgagcactacaacattagcagttccggctaatatgcgtgtcttacaccttggtgccggttcggataagggtgttgcccctgggtctgcagttcttaggcagtggctaccagcgggaagtattcttgtagataatgatgtgaatccatttgtgagtgacagtgtcgcctcatattatggaaattgtataaccttaccctttgattgtcagtgggatctgataatttctgatatgtacgaccctcttactaagaacattggggagtacaacgtgagtaaagatggattctttacttacctctgtcatttaattcgtgacaagttggctctgggtggcagtgttgccataaaaataacagagttttcttggaacgctgagttatatagtttaatggggaagtttgcgttctggacaatcttttgcaccaacgtaaacgcctcttcaagtgaaggatttttgattggcataaattggttgaataagacccgtaccgaaattgacggtaaaaccatgcatgccaattatctgttttggagaaatagtacaatgtggaatggaggggcttacagtctctttgacatgagtaagttccctttgaaagcggctggtacggctgttgttagccttaaaccagaccaaataaatgacttagtcctctccttgattgagaagggcaagttattagtgcgtgatacacgcaaagaagtttttgttggcgatagcctagtaaatgtcaaataaatctatacttgtcgtggctgtgaaaatggcctttgctgacaagcctaatcatttcataaactttcccctggcccaatttagtggctttatgggtaagtatttaaagctacagtctcaacttgtggaaatgggtttagactgtaaattacagaaggcaccacatgttagtattaccctgcttgatattaaagcagaccaatacaaacaggtggaatttgcaatacaagaaataatagatgatctggcggcatatgagggagatattgtctttgacaaccctcacatgcttggcagatgccttgttcttgatgttagaggatttgaagagttgcatgaagatattgttgaaattctccgcagaaggggttgcacggcagatcaatccagacactggattccgcactgcactgtggcccaatttgacgaagaaagagaaacaaaaggaatgcaattctatcataaagaacccttctacctcaagcataacaacctattaacggatgctgggcttgagctcgtgaagataggttcttccaaaatagatgggttttattgtagtgaactgagtgtttggtgtggtgagaggctttgttataagcctccaacacccaaattcagtgatatatttggctattgctgcatagataaaatacgtggtgatttagaaataggcgacctgccgcaggatgatgaggaagcgtgggccgagctaagttaccactatcaaagaaacacctacttcttcagacatgtgcacgataatagcatctattttcgtaccgtgtgtagaatgaagggttgtatgtgttgatttgtttttacactattagtgtaataagcttattattttgttgaaaagggcaggatgtgcatagctatggctcctcgcacactgcttttgctgatttgatgtcagctggtgtttgggttcaatgaacctcttaacatcgtttcacatttaaatgatgactggtttctatttggtgacagtcggtccgactgtacctatgtagaaaataacggtcatcctaaattagattggcttgacctcgacccaaagttgtgtaattcaggaaagatttccgcaaagagtggtaactctctctttaggagttttcacttcactgatttttacaattatacgggtgagggataccaaattgtattttatgaaggagttaattttagtcccagccatggctttaaatgcctggctcatggagataataaaagatggatgggcaataaagctcgattttatgcccgagtgtatgagaagatggcccaatataggagcctatcgtttgttaatgtgtcttatgcctatggaggtaatgcaaagcccgcctccatttgcaaagacaatactttaacactcaataaccccaccttcatatcgaaggagtctaattatgttgattactactacgagagtgaggctaatttcacactagaaggttgtgatgaatttatagtaccgctctgtggttttaatggccattccaagggctcgtcgtcggatgctgccaataaatattatactgactctcagagttactataatatggatattggtgtcttatatgggttcaattcgaccttggatgttggcaacactgctaaggatccgggtcttgatctcacttgtaggtatcttgcattgactcctggtaattataaggctgtgtccttagaatatttgttaagcttaccctcaaaggctatttgcctccataagacaaagcgctttatgcctgtgcaggtagttgactcaaggtggagtagcatccgccagtcagacaatatgaccgctgcagcctgtcagctgccatattgtttctttcgcaacacatctgcgaattatagtggtggcacacatgatgcgcaccatggtgattttcatttcaggcagttattgtctggtttgttatataatgtttcctgtattgcccagcagggtgcatttctttataataatgtgtcgtcctcttggccagcctatgggtacggtcattgtccaacggcagctaacattggttatatggcacctgtttgtatctatgaccctctcccggtcatactgctaggtgtgttattgggtatagctgtgttgactattgtgtttctgatgttttattttatgacggatagcggtgttagattgcatgaggcataatctaaacatgtttgtttttcttgttttattgccactagtctctagtcagtgtgttaatcttacaaccagaactcaattaccccctgcatacactaattctttcacacgtggtgtttattaccctgacaaagttttcagatcctcagttttacattcaactcaggacttgttcttacctttcttttccaatgttacttggttccatgctatacatgtctctgggaccaatggtactaagaggtttgataaccctgtcctaccatttaatgatggtgtttactttgcttccactgagaagtctaacataataagaggctggatttttggtactactttagattcgaaaacccagtccctacttattgttaataacgctactaatgttgttatcaaagtctgtgaatttcaattttgtaacgatccatttttgggtgtttattaccacaaaaacaacaaaagttggatggaaagtgagttcagagtttattctagtgcgaataattgcacttttgaatacgtctctcagccttttcttatggaccttgaaggaaaacagggtaatttcaaaaatcttagggaatttgtgttcaagaatattgatggttacttcaagatatactctaagcacacgcctattaatttagtgcgtgatctccctcagggtttttcggctttagaaccattggtagatttgccaataggtattaacatcactaggtttcaaactttacttgctttacatagaagttatttaactcctggtgattcttcttcaggttggacagctggtgctgcagcttattatgtgggttatcttcaacctaggacttttctactgaagtacaatgaaaatggaaccattacagatgctgtagactgtgcacttgaccctctctcagaaacaaagtgtacgttgaaatccttcactgtagaaaaaggaatctatcaaacttctaactttagagtccaaccaacagaatctattgttagatttcctaacatcacaaacttgtgcccttttggtgaagtttttaacgccaccagatttgcatctgtttatgcttggaacaggaagagaatcagcaactgtgttgctgattattctgtcctgtataattccgcatcattttccacttttaagtgttatggagtgtctcctactaaattaaatgatctctgctttactaatgtctatgcagattcatttgtaattagaggtgatgaagtcagacaaatcgctccagggcaaactggaaagattgctgattataactacaaattaccagatgattttacaggctgcgttatagcttggaattctaacaatcttgattctaaggttggtggtaattataattacctgtacagattgtttaggaagtctaatctcaaaccttttgagagagatatttcaactgaaatctatcaggccggtagcacaccttgtaatggtgttgaaggttttaattgttactttcctctgcaatcatatggtttccaacccactaatggtgttggttaccaaccatacagagtagtagtactttcttttgaacttctacatgcaccagcaactgtttgtggacctaaaaagtctactaatttggttaagaacaagtgtgtcaatttcaacttcaatggtttaacaggcacaggtgttcttactgagtctaacaaaaagtttctgcctttccaacaatttggcagagacattgctgacactactgatgctgttcgtgatccacaaacacttgagattcttgacattacaccatgttcttttggtggtgtcagtgttataacaccaggaacaaatacttctaaccaggttgctgttctttatcaggatgttaactgcacagaagtccctgttgctattcatgcagatcaacttactcctacttggcgtgtttattctacaggttctaatgtttttcaaacacgtgcaggctgtttaataggggctgaacatgtcaacaactcatatgagtgtgacatacccattggtgcaggtatatgcgctagttatcagactcagactaattctcctcggagagcaagaagtgtagctagtcaatccatcattgcctacactatgtcacttggtgcagaaaattcagttgcttactctaataactctattgccatacccacaaattttactattagcgttaccacagaaattctaccagtgtctatgaccaagacatcagtagattgtacaatgtacatttgtggtgattcaactgaatgcagcaatcttttgttgcaatatggcagtttttgtacacaattaaaccgtgctttaactggaatagctgttgaacaagacaaaaacacccaagaagtttttgcacaagtcaaacaaatttacaagacaccaccaattaaagattttggcggttttaattttagccagatactgccagatccatcaaaaccaagcaagaggtcatttattgaagatctactgttcaacaaagtgacacttgcagatgctggcttcatcaaacaatatggtgattgccttggtgatattgctgctagagacctcatttgtgcacaaaagtttaacggccttactgttttgccacctttgctcacagatgaaatgattgctcaatacacttctgcactgttagcaggtacaatcacttctggttggacttttggtgcaggtgctgcattacaaataccatttgctatgcaaatggcttataggtttaatggtattggagttacacagaatgttctctatgagaaccaaaaattgattgccaaccaatttaatagtgctattggcaaaattcaagactcactttcttccacagcaagtgcacttggaaaacttcaagatgtggtcaaccaaaatgcacaagctttaaacacgcttgttaaacaacttagctccaattttggtgcaatttcaagtgttttaaacgacatcctttcacgtcttgacaaagttgaggctgaagtgcaaattgataggttgatcacaggcagacttcaaagtttgcagacatatgtgactcaacaattaattagagctgcagaaatcagagcttctgctaatcttgctgctactaaaatgtcagagtgtgtacttggacaatcaaaaagagttgacttttgcggaaagggctatcatcttatgtcatttcctcagtcagcacctcatggtgtcgtctttttgcatgtgacttatgtccctgcacaagaaaagaacttcacaactgctcctgccatttgtcatgatggaaaagcacactttcctcgtgaaggtgtctttgtttcaaatggcacacactggtttgtaacacaaaggaatttttatgaaccacaaatcattactacagacaacacatttgtgtctggtaactgtgatgttgtaataggaattgtcaacaacacagtttatgatcctttgcaacctgaattagactcattcaaggaggagcttgataaatacttcaagaaccatacctcaccagatgttgatttaggtgacatctctggcattaatgcttcagttgtaaacattcagaaagaaatcgaccgcctcaatgaggttgccaagaatttaaatgaatctctcatcgatctccaagaacttggaaagtatgagcagtatataaaatggccatggtacatttggctaggttttatagctggcttgattgccatagtaatggtgacaattatgctttgctgtatgaccagttgctgtagttgtctcaagggctgttgttcttgtggatcctgctgcaaatttgacgaggacgactctgagccagtgctcaaaggagtcaaattacattacacataactatcacagcctctcctggaaagacagaaaatctaaacaatttatagcattctcattgctacctggccccgtaagaggcagtcatagctatggccgtgttggtcctaaggctacattggctgctgtctttattggtccatttattgtagcatgtatgctaggcattggcctagtttatttattgcaattgcaagttcaaatttttcatgttaaggataccatacgtgtgactggcaagccagccactgtgtcttatactacaagtacaccagtaacaccgagcgcgacgacgctcgatggtactacgtatactttaattagacccactagctcttatacaagagtttatcttggtactccaagaggttttgattatagtacatttgggcctaagaccctagattatgttactaatctaaacctcatcttaattctggtcgtccatatacttttaaggcattgtccaggcatatgaggccaacagccacatggatttggcatgtgagtgatgcatggttacgccgcacgcgggactttggtgtcattcgcctagaagatttttgttttcaatttaattatagccaaccccgagttggttattgtagagttcctttaaaggcttggtgtagcaaccagggtaaatttgcagcgcagtttaccctaaaaagttgcgaaaaaccaggtcacgaaaaatttattactagcttcacggcctacggcagaactgtccaacaggccgttagcaagttagtagaagaagctgttgattttattctttttagggccacgcagctcgaaagaaatgtttaatttattccttacagacacagtatggtatgtggggcagattatttttatattcgcagtgtgtttgatggtcaccataattgtggttgccttccttgcgtctatcaaactttgtattcaactttgcggtttatgtaatactttggtgctgtccccttctatttatttgtatgataggagtaagcagctttataagtactataatgaagaaatgagactgcccctattagaggtggatgatatctaatccaaacattatgagtagtactactcaggccccagagcccgtctatcaatggaccgccgacgaggcagttcaattccttaaggaatggaacttctcgttgggcattatactactctttattactatcatactacagttcggttacacgagccgtagcatgtttatttatgttgtgaaaatgataatcttgtggttaatgtggccactgactattgttttgtgtattttcaattgcgtgtatgcgctaaataatgtgtatcttggattttctatagtgtttactatagtgtccattgtaatctggatcatgtattttgtgaacagcataaggttgtttatcaggactggtagctggtggagcttcaaccccgaaacaaacaaccttatgtgtatagatatgaaaggtaccgtgtatgttagacccattattgaggattaccatacactaacagccactattattcgtggccacctctacatgcaaggtgttaagctaggcaccggtttctctttgtctgacttgcccgcttatgttacagttgctaaggtgtcacacctttgcacttataagcgcgcattcttagacaaggtagacggtgttagcggttttgctgtttatgtgaagtccaaggtcggaaattaccgactgccctcaaacaaaccgagtggcgcggacaccgcattgttgagaacctaatctaaactttaaggagagaatgaatcctatgtcggcgctcggtggtaacccctcgcgagaaagtcgggataggacactctctatcagaatggatgtcttgctgtcataacagatagagaaggttgtggcagaccctgtatcaattagttgaaagagattgcaaaatagagaatgtgtgagagaagttagcaaggtcctacgtctaaccataagaacggcgataggcgccccctgggaacagctcacatcagggtactattcctgcaatgccctagtaaatgaatgaagttgatcatggccaattggaagaatcacaaaaaaaaaaaaaaaaacggccggttt

SEQ ID NO: 34 - DNA, 27671 bp, Artificial Sequence
  COVAX191_delta_HEN_RNA
gtataagagtgattggcgtccgtacgtaccctctcaactctaaaactcttgtagtttaaatctaatctaaactttataaacggcacttcctgcgtgtccatgcccgcgggcctggtcttgtcatagtgctgacatttgtagttccttgactttcgttctctgccagtgacgtgtccattcggcgccagcagcccacccataggttgcataatggcaaagatgggcaaatacggcctgggcttcaaatgggccccagaatttccatggatgcttccgaacgcatcggagaagttgggtaaccctgagaggtcagaggaggatgggttttgcccctctgctgcgcaagaaccgaaagttaaaggaaaaactttggttaatcacgtgagggtgaattgtagccggcttccagctttggaatgctgtgttcagtctgccataatccgtgatatttttgtagatgaggatccccagaaggtggaggcctcaactatgatggcattgcagttcggtagtgccgtcttggttaagccatccaagcgcttgtctattcaggcatggactaatttgggtgtgcttcccaaaacagctgccatggggttgttcaagcgcgtctgcctgtgtaacaccagggagtgctcttgtgacgcccacgtggcctttcacctttttacggtccaacccgatggtgtatgcctgggtaatggccgttttataggctggttcgttccagtcacagccataccggagtatgcgaagcagtggttgcaaccctggtccatccttcttcgtaagggtggtaacaaagggtctgtgacatccggccacttccgccgcgctgttaccatgcctgtgtatgactttaatgtagaggatgcttgtgaggaggttcatcttaacccgaagggtaagtactcctgcaaggcgtatgccctgctgaagggctatcgcggtgttaagcccatcctgtttgtggaccagtatggttgcgactatactggatgtctcgccaagggtcttgaggactatggcgatctcaccttgagtgagatgaaggagttgttccctgtgtggcgtgactccttggatagtgaagtccttgtggcttggcacgttgatcgagatcctcgggctgctatgcgtctgcagactcttgctactgtacgttgcattgattatgtgggccaaccgaccgaggatgtggtggatggagatgtggtagtgcgtgagcctgctcatcttctcgcagccaatgccattgttaaaagactcccccgtttggtggagactatgctgtatacggattcgtccgttacagaattctgttataaaaccaagctgtgtgaatgcggttttatcacgcagtttggctatgtggattgttgtggtgacacctgtgattttcgtgggtgggttgccggcaatatgatggatggctttccatgtccagggtgtaccaaaaattatatgccctgggaattggaggcccagtcatcaggtgttataccagaaggaggtgttctattcactcagagcactgatacagtgaatcgtgagtcctttaagctctacggtcatgctgttgtgccttttggttctgctgtgtattggagcccttgcccaggtatgtggcttccagtaatttggtcgtcggttaagtcatactctggtttgacttatacaggagtagttggttgtaaggcaattgttcaagagacagacgctatatgtcgttctctgtatatggattatgtccagcacaagtgtggcaatctcgagcagagagctatccttggattggacgatgtctatcatagacagttgcttgtgaataggggtgactatagtctcctccttgagaatgtggatttgtttgttaagcggcgcgctgaatttgcttgcaaattcgccacctgtggagatggtcttgtacccctcctactagatggtttagtgccccgcagttattatttgattaagagtggtcaagctttcacctctatgatggttaattttagccatgaggtgactgacatgtgtatggacatggctttattgttcatgcatgatgttaaagtggccactaagtatgttaagaaggttactggcaaactggccgtgcgctttaaagcgttgggtgtagccgttgtcagaaaaattactgaatggtttgatttagccgtggacattgctgctagtgccgctggatggctttgctaccagctggtaaatggcttatttgcagtggccaatggtgttataacctttgtacaggaggtgcctgagcttgtcaagaattttgttgacaagttcaaggcatttttcaaggttttgatcgactctatgtcggtttctatcttgtctggacttactgttgtcaagactgcctcaaatagggtgtgtcttgctggcagtaaggtttatgaagttgtgcagaaatctttgtctgcatatgttatgcctgtgggttgcagcgaagccacttgtttggtgggtgagattgaacctgcagtttttgaagatgatgttgttgatgtggttaaagccccattaacatatcaaggctgttgtaagccacccacttctttcgagaagatttgtattgtggataaattgtatatggccaagtgtggtgatcaattttaccctgtggttgttgataacgacactgttggcgtgttagatcagtgctggaggtttccctgtgcgggcaagaaagtcgagtttaacgacaagcccaaagtcaggaagataccctccacccgtaagattaagatcaccttcgcactggatgcgacctttgatagtgttctttcgaaggcgtgttcagagtttgaagttgataaagatgttacattggatgagctgcttgatgttgtgcttgacgcagttgagagtacgctcagcccttgtaaggagcatgatgtgataggcacaaaagtttgtgctttacttgataggttggcaggagattatgtctatctttttgatgagggaggcgatgaagtgatcgccccgaggatgtattgttccttttctgctcctgatgacgaggactgcgttgcagcggatgttgtagatgcagatgaaaaccaagatgatgatgccgaggactcagcagtccttgtcgctgatacccaagaagaggacggcgttgccaaggggcaggttgaggcggattcggaaatttgcgttgcgcatactggtagtcaagaagaattggctgagcctgatgctgtcggatctcaaactcccatcgcctctgctgaggaaaccgaagtcggagaggcaagcgacagggaagggattgctgaggcgaaggcaactgtgtgtgctgatgctgtagatgcctgccccgatcaagtggaggcatttgaaattgaaaaggtcgaggactctatcttggatgagcttcaaactgaacttaatgcgccagcggacaagacctatgaggatgtcttggcattcgatgccgtatgctcagaggcgttgtctgcattctatgctgtgccgagtgatgagacgcactttaaagtgtgtggattctattcgcctgctatagagcgcactaattgttggctgcgttctactttgatagtaatgcagagtctacctttggaatttaaagacttggagatgcaaaagctctggttgtcttacaaggccggctatgaccaatgctttgtggacaaactagttaagagcgtgcccaagtctattatccttccacaaggtggttatgtggcagattttgcctatttctttctaagccagtgtagctttaaagcttatgctaactggcgttgtttagagtgtgacatggagttaaagcttcaaggcttggacgccatgtttttctatggggacgttgtgtctcatatgtgcaagtgtggtaatagcatgaccttgttgtctgcagatataccctacactttgcattttggagtgcgagatgataagttttgcgctttttacacgccaagaaaggtctttagggctgcttgtgcggtagatgttaatgattgtcactctatggctgtagtagagggcaagcaaattgatggtaaagtggttaccaaatttattggtgacaaatttgattttatggtgggttacgggatgacatttagtatgtctccttttgaactcgcccagttatatggttcatgtataacaccaaatgtttgttttgttaaaggagatgttataaaggttgttcgcttagttaatgctgaagtcattgttaaccctgctaatgggcgtatggctcatggtgccggcgtcgccggcgccatagctgaaaaggcgggcagtgcttttattaaagaaacctccgatatggtgaaggctcagggcgtttgccaggttggtgaatgctatgaatctgccggtggtaagttatgtaaaaaggtgcttaacattgtagggccagatgcgcgagggcatggcaagcaatgctattcacttttagagcgtgcttatcagcatattaataagtgtgacaatgttgtcactactttaatttcggctggtatatttagtgtgcctactgatgtctccctaacttacttacttggtgtagtgacaaagaatgtcattcttgtcagtaacaaccaggatgattttgatgtgatagagaagtgtcaggtgacctccgttgctggtaccaaagcgctatcacttcaattggccaaaaatttgtgccgtgatgtaaagtttgtgacgaatgcatgtagttcgctttttagtgaatcttgctttgtctcaagctatgatgtgttgcaggaagttgaagcgctgcgacatgatatacaattggatgatgatgctcgtgtctttgtgcaggctaatatggactgtctgcccacagactggcgtctcgttaacaaatttgatagtgttgatggtgttagaaccattaagtattttgaatgcccgggcgggatttttgtatccagccagggcaaaaagtttggttatgttcagaatggttcatttaaggaggcgagtgttagccaaataagggctttactcgctaataaggttgatgtcttgtgtactgttgatggtgttaacttccgctcctgctgcgtagcagagggtgaagtttttggcaagacattaggttcagtcttttgtgatggcataaatgtcaccaaagttaggtgtagtgccatttacaagggtaaggttttctttcagtacagtgatttgtccgaggcagatcttgtggctgttaaagatgcctttggttttgatgaaccacaactgctgaagtactacactatgcttggcatgtgtaagtggccagtagttgtttgtggcaattattttgctttcaagcagtcaaataataattgctacatcaacgtggcatgtttaatgctgcaacacttgagtttaaagtttcctaagtggcaatggcaagaggcttggaacgagttccgctctggtaaaccactaaggtttgtgtccttggtattagcaaagggcagctttaaatttaatgaaccttctgattctatcgattttatgcgtgtggtgctacgtgaagcagatttgagtggtgccacgtgcaatttggaatttgtttgtaaatgtggtgtgaagcaagagcagcgcaaaggtgttgacgctgttatgcattttggtacgttggataaaggtgatcttgtcaggggttataatatcgcatgtacgtgcggtagtaaacttgtgcattgcacccaatttaacgtaccatttttaatttgctccaacacaccagagggtaggaaactgcccgacgatgttgttgcagctaatatttttactggtggtagtgtgggccattacacgcatgtgaaatgtaaacccaagtaccagctttatgatgcttgtaatgttaataaggtttcggaggctaagggtaattttaccgattgcctctaccttaaaaatttaaagcaaaccttctcgtctgtgctgacgactttttatttagatgacgtaaagtgtgtggagtataagccagatttatcgcagtattactgtgagtctggtaaatattatacaaaacccattattaaggcccaatttagaacatttgagaaggttgatggtgtctataccaactttaaattggtgggacatagtattgctgaaaaactcaatgctaagctgggatttgattgtaattctccctttgtggagtacaaaattacagagtggccaacagctactggagatgtggtgttggctagtgatgatttgtatgtaagtcggtacttaagcgggtgcattacttttggtaaaccggttgtctggcttggccatgaggaagcatcgctgaaatctctcacatattttaatagacctagtgtcgtttgtgaaaataaatttaacgtgttgcccgttgatgtcagtgaacccacggacaaggggcctgtgcctgctgcagtccttgttaccggcgtccctggagctgatgcgtcagctggtgccggtattgccaaggagcaaaaagcctgtgcttctgctagtgtggaggatcaggttgttacggaggttcgtcaagagccatctgtttcagctgctgatgtcaaagaggttaaattgaatggtgttaaaaagcctgttaaggtggaaggtagtgtggttgttaatgatcccactagcgaaaccaaagttgttaaaagtttgtctattgttgatgtctatgatatgttcctgacagggtgtaagtatgtggtttggactgctaatgagttgtctcgactagtaaattcaccgactgttagggagtatgtgaagtggggtatgggaaagattgtaacacccgctaagttgttgttgttaagagatgagaagcaagagttcgtagcgccaaaagtagtcaaggcgaaagctattgcctgctattgtgctgtgaagtggtttctcctctattgttttagttggataaagtttaatactgacaataaggttatatacaccacagaagtagcttcaaagcttactttcaagttgtgctgtttggcctttaagaatgccttacagacgtttaattggagcgttgtgtctaggggctttttcctagttgcaacggtctttttactctggtttaactttttgtatgctaatgttattttgagtgacttctatttgcctaatattgggcctctccctacgtttgtgggacagatagttgcgtggtttaagactacatttggtgtgtcaaccatctgtgatttctaccaggtgacggatttgggctatagaagttcgttttgtaatggaagtatggtatgtgaactatgcttctcaggttttgatatgctggacaactatgatgctataaatgttgttcaacacgttgtagataggcgtttgtcctttgactatattagcctatttaaactggtagttgagcttgtaatcggctactctctttatactgtgtgcttctacccactgtttgtccttattggaatgcagttattgaccacatggttgcctgaattctttatgctggagactatgcattggagtgctcgtttgtttgtgtttgttgccaatatgcttccagcttttacgttactgcgattttacatcgtggtgacagctatgtataaggtctattgtctttgtagacatgttatgtatggatgtagtaagcctggttgcttgttttgttataagagaaaccgtagtgtccgtgttaagtgtagcaccgttgttggtggttcactacgctattacgatgtaatggctaacggcggcacaggtttctgtacaaagcaccagtggaactgtcttaattgcaattcctggaaaccaggcaatacattcataactcatgaagcagcggcggacctctctaaggagttgaaacgccctgtgaatccaacagattctgcttattactcggtcacagaggttaagcaggttggttgttccatgcgtttgttctacgagagagatggacagcgtgtttatgatgatgttaatgctagtttgtttgtggacatgaatggtctgctgcattctaaagttaaaggtgtgcctgaaacgcatgttgtggttgttgagaatgaagctgataaagctggttttctcggcgccgcagtgttttatgcacaatcgctctacagacctatgttgatggtggaaaagaaattaataactaccgccaacactggtttgtctgttagtcgaactatgtttgacctttatgtagattcattgctgaacgtcctcgacgtggatcgcaagagtctaacaagttttgtaaatgctgcgcacaactctctaaaggagggtgttcagcttgaacaagttatggatacctttattggctgtgcccgacgtaagtgtgctatagattctgatgttgaaaccaagtctattaccaagtccgtcatgtcggcagtaaatgctggcgttgattttacggatgagagttgtaataacttggtgcctacctatgttaaaagtgacactatcgttgcagccgatttgggtgttcttattcagaataatgctaagcatgtacaggctaatgttgctaaagccgctaatgtggcttgcatttggtctgtggatgcttttaaccagctatctgctgacttacagcataggctgcgaaaagcatgttcaaaaactggcttgaagattaagcttacttataataagcaggaggcaaatgttcctattttaactacaccgttctctcttaaagggggcgctgtttttagtagaatgttacaatggttgtttgttgctaatttgatttgtttcattgtgttgtgggcccttatgccaacatatgcagtgcacaaatcggatatgcagttgcctttatatgccagttttaaagttatagataacggtgtgctaagggatgtgtctgttactgacgcatgcttcgcaaacaaatttaatcaattcgaccaatggtatgagtctacttttggtcttgcttattaccgcaactctaaggcttgtcctgttgtggttgctgtaatagatcaagacattggccataccttatttaatgttcctaccacagttttaagatatggatttcatgtgttgcattttataacccatgcatttgctactgatagcgtgcagtgttacacgccacatatgcaaatcccctatgataatttctatgctagtggttgcgtgttgtcatccctctgtactatgcttgcgcatgcagatggaaccccgcatccttattgttatacagggggtgttatgcataatgcctctctgtatagttctttggctcctcatgtccgttataacctggctagttcaaatggttatatacgttttcccgaagtggttagtgaaggcattgtgcgtgttgtgcgcactcgctctatgacctactgcagggttggtttatgtgaggaggccgaggagggtatctgctttaattttaatcgttcatgggtattgaacaacccgtattatagggccatgcctggaactttttgtggtaggaatgcttttgatttaatacatcaagttttaggaggattagtgcggcctattgatttctttgccttaacggcgagttcagtggctggtgctatccttgcaattattgtcgttttggctttctattatttaatcaagcttaagcgtgcctttggtgactacactagtgttgtggttatcaatgtaattgtgtggtgtataaattttctgatgctttttgtgtttcaggtttatcccacattgtcttgtttatatgcttgtttctacttctacaccacgctttatttcccttcggagataagtgttgttatgcatttgcaatggcttgtcatgtatggtgctattatgcccttgtggttttgcattatttacgtggcagtcgttgtttcaaaccatgcattgtggttgttctcttactgccgcaaaattggtaccgaggttcgtagtgacggcacatttgaggaaatggcccttactacctttatgattactaaagaatcttattgtaagttgaaaaactctgtttctgatgttgcttttaacaggtacttgagtctttacaacaagtaccgttacttcagtggcaaaatggatactgccgcttatagagaggctgcctgttcacaactggcaaaggcaatggaaacatttaaccataataatggtaatgatgttctctatcagcctccaaccgcctctgttactacatcatttttacagtctggtatagtgaagatggtgtcgcccacctctaaagtggagccttgtattgttagtgttacttatggtaacatgacacttaatgggttgtggttggatgataaagtttattgcccaagacatgttatctgttcttcagctgacatgacagaccctgattatcctaatttgctttgtagagtgacatcaagtgatttttgtgttatgtctggtcgtatgagccttactgtaatgtcttatcaaatgcagggctgccaacttgttttgactgttacactgcaaaatcctaacacgcctaagtattccttcggtgttgttaagcctggtgagacatttactgtactggctgcatacaatggcagacctcaaggagccttccatgttacgcttcgtagtagccataccataaagggctcctttctatgtggatcctgcggttctgtaggatatgttttaactggcgatagtgtacgatttgtttatatgcatcagctagagttgagtactggttgtcataccggtactgactttagtgggaacttttatggtccctatagagatgcgcaagttgtacaattgcctgttcaggattatacgcagactgttaatgttgtagcttggctttatgctgctatttttaacagatgcaactggtttgtgcaaagtgatagttgttccctggaggagtttaatgtttgggctatgaccaatggttttagctcaatcaaagccgatcttgtcttggatgcgcttgcttctatgacaggcgttacagttgaacaggtgttggccgctattaagaggctgcattctggattccagggcaaacaaattttaggtagttgtgtgcttgaagatgagctgacaccaagtgatgtttatcaacaactagctggtgtcaagctacagtcaaagcgcacaagagttataaaaggtacatgttgctggatattggcttcaacgtttttgttctgtagcattatctcagcatttgtaaaatggactatgtttatgtatgttactacccatatgttgggagtgacattgtgtgcactttgttttgtaagctttgctatgttgttgatcaagcataagcatttgtatttaactatgtacatcatgcctgtgttatgcacactgttttacaccaactatttggttgtgtacaaacagagttttagaggtctagcttatgcttggctttcacactttgtccctgctgtagattatacatatatggatgaagttttatatggtgttgtgttgctagtagctatggtgtttgttaccatgcgtagcataaaccacgacgtcttttctattatgttcttggttggtagacttgtcagcctggtatccatgtggtattttggagccaatttagaggaagaggtactattgttcctcacatccctatttggcacgtacacatggactactatgttgtcattggctaccgctaaggttattgctaaatggttggctgtgaatgtcttgtacttcacagacgtaccgcaaattaaattagttctgttgagctacttgtgtattggttatgtgtgttgttgttattggggaatcttgtcactccttaatagcatttttaggatgccattgggcgtctacaattataaaatctccgttcaggagttacgttatatgaatgctaatggcttgcgcccacctagaaatagttttgaggccctgatgcttaattttaagctgttgggaattggtggtgtgccagtcattgaagtatctcaaattcaatcaagattgacggatgttaaatgtgctaatgttgtgttgcttaattgcctccagcacttgcatattgcatctaattctaagttgtggcagtattgtagtactttgcacaatgaaatactggctacatctgatttgagcgtggccttcgataagttggctcaactcttagttgttttatttgctaatccagcagcagtggatagcaagtgccttgcaagtattgaagaagtgagcgatgattacgttcgcgacaatactgtcttgcaagccttacagagtgaatttgttaatatggctagcttcgttgagtatgaacttgctaagaagaatctagatgaggctaaggctagcggctctgccaatcaacagcagattaagcagctagagaaggcgtgtaatattgctaagtcagcatatgagcgcgacagagctgttgctcgtaagctggaacgtatggctgatttagctcttacaaacatgtataaagaagctagaattaatgataagaagagtaaggtagtgtctgcattgcaaaccatgctctttagtatggtgcgtaagctagataaccaagctcttaattctattttagacaacgcagttaagggttgtgtacctttgaatgcaataccatcattgacttcgaacactctgactataatagtgccagataagcaggtttttgatcaggttgtggataatgtgtatgtcacctatgctgggaatgtatggcatatacagtttattcaagatgctgatggtgctgttaaacaattgaatgagatagatgttaattcaacctggcctctagtcattgctgcaaataggcataatgaagtgtctactgttgttttgcagaacaatgagttgatgcctcagaagttgagaactcaggttgtcaatagtggctcagatatgaattgtaatactcctacccagtgttactataatactactggcacgggtaagattgtgtatgctatacttagtgactgtgacggcctgaagtacactaagatagtaaaagaagatggaaattgtgttgttttggaattggatcctccctgtaagttttctgttcaggatgtgaagggccttaaaattaagtacctttactttgtgaaggggtgtaatacactggctagaggctgggttgtaggcaccttatcctcgacagtgagattgcaggcgggtacggcaactgagtatgcctccaactctgcaatactgtcgctgtgtgcgttttctgtagatcctaagaaaacgtacttggattatataaaacagggtggagttcccgttactaattgtgttaagatgttatgtgaccatgctggcactggtatggccattactattaagccggaggcaaccactaatcaggattcttatggtggtgcttccgtttgtatatattgccgctcgcgtgttgaacatccagatgttgatggattgtgcaaattacgcggcaagtttgtccaagtgcccttaggcataaaagatcctgtgtcatatgtgttgacgcatgatgtttgtcaggtttgtggcttttggcgagatggtagctgttcctgtgtaggcacaggctcccagtttcagtcaaaagacacgaactttttaaacggattcggggtacaagtgtaaatgcccgtcttgtaccctgtgccagtggcttggacactgatgttcaattaagggcatttgacatttgtaatgctaatcgagctggcattggtttgtattataaagtgaattgctgccgcttccagcgtgtagatgaggacggcaacaagttggataagttctttgttgttaaaagaactaatttagaagtgtataacaaggagaaagaatgctatgagttgacaaaagaatgcggtgttgtggctgaacacgagttcttcacatttgatgtggagggaagtcgggtaccacacatagtccgtaaagatctttcaaagtttactatgttagatctttgctatgcattgcgtcattttgaccgcaatgattgttcaactcttaaggaaattctccttacatatgctgagtgtgaagagtcctacttccaaaagaaggactggtatgattttgttgagaatcctgatataattaatgtgtacaagaagcttggtcctatatttaatagagccctgcttaacactgccaagtttgcagacgcattagtggaggcaggcttagtaggtgttttaacacttgataatcaagatttatatggtcaatggtatgactttggagattttgtcaagacagtacctggttgtggtgttgccgtggcagactcttattattcatatatgatgccaatgctgactatgtgtcatgcgttggatagtgagttgtttgttaatggtacttatagggagtttgaccttgttcagtatgattttactgatttcaagctagagctgttcactaagtattttaagcattggagtatgacctaccacccgaacacctgtgagtgcgaggatgacaggtgcattattcattgcgccaattttaatatacttttcagcatggtcttacctaagacctgttttgggcctcttgttaggcagatatttgtggatggtgttcctttcgttgtgtcgatcggttaccattataaagaattaggtgttgttatgaatatggatgtggatacacatcgttatcgcttgtctcttaaggacttgcttttgtatgctgcagaccctgcccttcatgtggcgtctgctagtgcactgcttgatttgcgcacatgttgttttagcgttgcagctattacaagtggcgtaaaatttcaaacagttaaacctggaaattttaatcaggatttctacgagtttattttgagtaaaggcctgcttaaagaggggagctccgttgatttgaagcacttcttctttacgcaggatggtaatgctgctattactgattacaattactacaagtataatctacccaccatggtggatattaagcagttgttgtttgttttagaagttgttaataagtacttcgagatctatgagggtgggtgtatacccgcaacacaggtcattgttaataattatgacaagagtgctggctatccatttaataaatttggaaaggccaggctctattatgaggcattatcatttgaggagcaggatgaaatttatgcgtataccaaacgcaatgtcctgccgaccctaactcaaatgaatcttaaatatgctattagtgctaagaatagggcccgcaccgttgctggtgtctctattctcagtactatgactggcagaatgtttcatcaaaagtgtctaaagagtatagcagctactcgcggtgttcctgtagttataggcaccacgaagttctatggcggttgggatgatatgttacgccgccttattaaagatgttgatagtcctgtactcatgggttgggactatcctaaatgtgatcgtgctatgccaaacatactgcgtattgttagtagtttggtgctagcccgtaaacatgattcgtgctgttcgcatacggatagattctatcgtcttgcgaacgagtgcgcccaagttttgagtgaaattgttatgtgtggtggttgttattatgttaaaccaggtggcactagtagtggggatgcaaccactgcttttgctaattctgtgtttaacatttgtcaagctgtttccgccaatgtatgctcgcttatggcatgcaatggacacaaaattgaagatttgagtatacgcgagttacaaaagcgcctatactctaatgtctatcgtgcggaccatgttgaccccgcatttgttagtgagtattatgagtttttaaacaagcattttagtatgatgattttgagtgatgatggtgttgtgtgttataattcagagtttgcgtccaagggttatattgctaatataagtgcctttcaacaggtattatattatcaaaacaacgtgtttatgtctgaggccaaatgttgggtagaaacagacatcgaaaagggaccgcatgaattttgttctcaacatacaatgctagtcaagatggatggtgatgaagtctaccttccataccctgatccttcgagaatcttaggagcaggctgttttgttgatgatttactcaagactgatagcgttctcttgatagagcgtttcgtaagtcttgcaattgatgcttatcctttagtataccatgagaacccagagtatcaaaatgtgttccgggtatatttagaatacatcaagaagctgtacaatgatctcggtaatcagatcctggacagctacagtgttattttaagtacttgtgatggtcaaaagtttactgacgagacgttttacaagaacatgtatttaagaagtgcagtgctgcaaagcgttggtgcctgcgttgtctgtagttctcaaacatcattacgttgtggcagttgcatacgcaagcctttgctgtgttgcaaatgcgcctatgatcatgttatgtccactgatcataaatatgtcctgagtgtgtcaccatatgtgtgtaattcaccgggatgtgatgtaaatgatgttaccaaattgtatttaggtggtatgtcatattattgtgaggaccataaaccacagtattcattcaaattggtgatgaatggtatggtttttggtttatataagcagtcttgtactggttcgccctacatagaggattttaataaaatcgctagttgcaaatggacagaagtcgatgattatgtgctagctaatgaatgcaccgaacgccttaaattgtttgccgcagaaacgcagaaggccacagaagaggcctttaagcaatgttatgcgtcagcaacgatccgtgagatcgtgagcgatcgggagttaattttatcttgggaaattggtaaagtccgcccgccacttaataaaaattacgtgttcaccggctaccattttactaataatggtaagacagttttaggtgagtatgtttttgataagagtgagttgactaatggtgtgtattatcgcgccacaaccacttataagttatctgtaggtgatgtgttcattttaacatcacacgcagtgtctagtttaagtgctcctacattagtaccgcaggagaattatactagcattcgttttgctagtgtttatagtgtgcctgagacgtttcagaataatgtgcctaattatcagcacattggaatgaagcgctattgtactgtacagggaccgcctggtactggtaagtcccatctagccattgggctagctgtttattattgtacagcgcgcgtggtgtataccgctgctagccatgctgcagttgacgcgctgtgtgaaaaggcacataaatttctcaacatcaacgactgcacgcgtattgttcctgcaaaggtgcgtgtagattgttatgataaattcaaggtcaatgacaccactcgcaagtatgtgtttactacaataaatgcattacctgagttggtgactgacattattgtcgttgatgaagttagtatgcttaccaactatgagctgtctgttattaacagtcgtgttagggctaagcattatgtgtatattggcgacccggcgcagttacctgcaccacgtgtgctactgaataagggaactctagaacctagatattttaattccgttaccaagctaatgtgttgtttgggtccagatattttcttgggcacctgttatagatgccctaaggagattgtggatacggtgtcagccttggtttataataataagctgaaggctaaaaatgataatagctccatgtgctttaaggtttattataagggccagactacacatgagagttctagtgctgttaatatgcagcaaatacatttaatttccaagtttctgaaggcaaaccccagttggagtaacgccgtatttattagtccttataactcgcagaactatgttgctaagagagtcttgggattacaaacccagacagtagactcagcgcagggttctgaatatgattttgttatctactcacagactgcggaaacagcgcattctgtcaatgtaaatagattcaatgttgctattacacgtgctaagaagggtattctctgtgtcatgagtagtatgcaattatttgagtctcttaattttactacactgacgttggataagattaacaatccacgattacagtgtactacaaatttgtttaaggattgtagcaggagctatgtaggatatcacccagcccatgcaccatcctttttggcagttgatgacaaatataaggtaggcggtgatttagccgtttgccttaatgttgctgattctgctgtcacttattcgcggcttatatcactcatgggattcaagcttgacttgacccttgatggttattgtaagctgtttataactagagatgaagctatcaaacgtgttagagcctgggttggcttcgatgcagaaggtgcccatgcgatacgtgatagcattgggacaaatttcccattacaattaggcttttcgactggaattgattttgttgtcgaagccactggaatgtttgctgagagagatggttatgtctttaaaaaggcagccgcacgagctcctcctggcgaacaatttaaacaccttatcccacttatgtcaagagggcagaaatgggatgtggttcgcattagaatagtacaaatgttgtcagaccacctagtggatttggcagacagtgttgtacttgtgacgtgggctgccagctttgagctcacatgtttgcgatatttcgctaaagttggaagagaagttgtgtgtagtgtctgcaccaagcgtgcgacatgttttaattctagaactggatactatggatgctggcgacatagttattcctgtgattacctgtacaacccactaatagttgacattcaacagtggggatatacaggatctttaactagcaatcatgatcctatttgcagcgtgcataagggtgctcatgttgcatcatctgatgctatcatgacccggtgtctagctgttcatgattgcttttgtaagtctgttaattggaatttagaataccccattatttcaaatgaggtcagtgttaatacctcctgcaggttattgcagcgcgtaatgtttagggctgcgatgctatgcaataggtatgatgtgtgttatgacattggcaaccctaaaggtcttgcctgtgtcaaaggatatgattttaagttctatgacgcctcccctgttgttaagtcggtcaaacagtttgtttacaaatacgaggcacataaagatcaatttttagatggtttgtgtatgttttggaactgcaatgtggataagtatccagcgaatgcagttgtgtgtaggtttgacacgcgtgtgttgaacaaattaaatctccctggctgtaatggtggcagtttgtatgttaacaaacatgcattccacaccagtccctttacccgggctgccttcgagaatttgaagcctatgcctttcttttattattcagatacgccctgtgtgtatatggaaggcatggaatctaagcaggtcgattatgtcccattgagaagcgctacatgcatcacaagatgcaatttaggtggcgctgtttgtttaaaacatgctgaggagtatcgtgagtaccttgagtcttacaatacggcaaccacagcgggttttactttttgggtctataagacttttgatttttacaacctttggaatacttttactaggctccaaagtttagaaaatgtagtgtataacctggtcaacgctggacactttgatggccgggcgggtgaactgccttgtgctgttataggtgagaaagtcattgccaagattcaaaatgaggatgtcgtggtctttaaaaataacacgccattccccactaatgtggctgtcgaattatttgctaagcgcagtattcggccccaccccgagcttaagctctttagaaatttgaatattgacgtgtgctggagtcacgtcctttgggattatgctaaggatagtgtgttttgcagttcgacgtataaggtctgcaaatacacagatttacagtgcattgaaagcttgaatgtactttttgatggtcgtgataatggtgctcttgaagcttttaagaagtgccggaatggcgtctacattaacacgacaaaaattaaaagtctgtcgatgattaaaggcccacaacgtgccgatttgaatggcgtagttgtggagaaagttggagattctgatgtggaattttggtttgctgtgcgtaaagacggtgacgatgttatcttcagccgtacagggagccttgaaccgagccattaccggagcccacaaggtaatccgggtggtaatcgcgtgggtgatctcagcggtaatgaagctctagcgcgtggcactatctttactcaaagcagattattatcttctttcacacctcgatcagagatggagaaagattttatggatttagatgatgatgtgttcattgcaaaatatagtttacaggactacgcgtttgaacacgttgtttatggtagttttaaccagaagattattggaggtttgcatttgcttattggcttagcccgtaggcagcaaaaatccaatctggtaattcaagagttcgtgacatacgactctagcattcattcgtactttatcactgacgagaacagtggtagtagtaagagtgtgtgcactgttattgatttattgttagatgattttgtggacattgtaaagtccctgaatctaaagtgtgtgagtaaggttgttaatgttaatgtggattttaaggacttccagtttatgttgtggtgcaatgaggagaaggtcatgactttctatcctcgtttgcaggctgctgctgactggaaacctggttatgttatgcctgtcttatataagtatttggaatcgcctctggaaagagtaaacctctggaattatggcaagccgattactttacctacaggatgtatgatgaatgttgctaagtatactcaattatgtcaatatttgagcactacaacattagcagttccggctaatatgcgtgtcttacaccttggtgccggttcggataagggtgttgcccctgggtctgcagttcttaggcagtggctaccagcgggaagtattcttgtagataatgatgtgaatccatttgtgagtgacagtgtcgcctcatattatggaaattgtataaccttaccctttgattgtcagtgggatctgataatttctgatatgtacgaccctcttactaagaacattggggagtacaacgtgagtaaagatggattctttacttacctctgtcatttaattcgtgacaagttggctctgggtggcagtgttgccataaaaataacagagttttcttggaacgctgagttatatagtttaatggggaagtttgcgttctggacaatcttttgcaccaacgtaaacgcctcttcaagtgaaggatttttgattggcataaattggttgaataagacccgtaccgaaattgacggtaaaaccatgcatgccaattatctgttttggagaaatagtacaatgtggaatggaggggcttacagtctctttgacatgagtaagttccctttgaaagcggctggtacggctgttgttagccttaaaccagaccaaataaatgacttagtcctctccttgattgagaagggcaagttattagtgcgtgatacacgcaaagaagtttttgttggcgatagcctagtaaatgtcaaataaacgaacaatgtttgtttttcttgttttattgccactagtctctagtcagtgtgttaatcttacaaccagaactcaattaccccctgcatacactaattctttcacacgtggtgtttattaccctgacaaagttttcagatcctcagttttacattcaactcaggacttgttcttacctttcttttccaatgttacttggttccatgctatacatgtctctgggaccaatggtactaagaggtttgataaccctgtcctaccatttaatgatggtgtttactttgcttccactgagaagtctaacataataagaggctggatttttggtactactttagattcgaaaacccagtccctacttattgttaataacgctactaatgttgttatcaaagtctgtgaatttcaattttgtaacgatccatttttgggtgtttattaccacaaaaacaacaaaagttggatggaaagtgagttcagagtttattctagtgcgaataattgcacttttgaatacgtctctcagccttttcttatggaccttgaaggaaaacagggtaatttcaaaaatcttagggaatttgtgttcaagaatattgatggttacttcaagatatactctaagcacacgcctattaatttagtgcgtgatctccctcagggtttttcggctttagaaccattggtagatttgccaataggtattaacatcactaggtttcaaactttacttgctttacatagaagttatttaactcctggtgattcttcttcaggttggacagctggtgctgcagcttattatgtgggttatcttcaacctaggacttttctactgaagtacaatgaaaatggaaccattacagatgctgtagactgtgcacttgaccctctctcagaaacaaagtgtacgttgaaatccttcactgtagaaaaaggaatctatcaaacttctaactttagagtccaaccaacagaatctattgttagatttcctaacatcacaaacttgtgcccttttggtgaagtttttaacgccaccagatttgcatctgtttatgcttggaacaggaagagaatcagcaactgtgttgctgattattctgtcctgtataattccgcatcattttccacttttaagtgttatggagtgtctcctactaaattaaatgatctctgctttactaatgtctatgcagattcatttgtaattagaggtgatgaagtcagacaaatcgctccagggcaaactggaaagattgctgattataactacaaattaccagatgattttacaggctgcgttatagcttggaattctaacaatcttgattctaaggttggtggtaattataattacctgtacagattgtttaggaagtctaatctcaaaccttttgagagagatatttcaactgaaatctatcaggccggtagcacaccttgtaatggtgttgaaggttttaattgttactttcctctgcaatcatatggtttccaacccactaatggtgttggttaccaaccatacagagtagtagtactttcttttgaacttctacatgcaccagcaactgtttgtggacctaaaaagtctactaatttggttaagaacaagtgtgtcaatttcaacttcaatggtttaacaggcacaggtgttcttactgagtctaacaaaaagtttctgcctttccaacaatttggcagagacattgctgacactactgatgctgttcgtgatccacaaacacttgagattcttgacattacaccatgttcttttggtggtgtcagtgttataacaccaggaacaaatacttctaaccaggttgctgttctttatcaggatgttaactgcacagaagtccctgttgctattcatgcagatcaacttactcctacttggcgtgtttattctacaggttctaatgtttttcaaacacgtgcaggctgtttaataggggctgaacatgtcaacaactcatatgagtgtgacatacccattggtgcaggtatatgcgctagttatcagactcagactaattctcctcggagagcaagaagtgtagctagtcaatccatcattgcctacactatgtcacttggtgcagaaaattcagttgcttactctaataactctattgccatacccacaaattttactattagcgttaccacagaaattctaccagtgtctatgaccaagacatcagtagattgtacaatgtacatttgtggtgattcaactgaatgcagcaatcttttgttgcaatatggcagtttttgtacacaattaaaccgtgctttaactggaatagctgttgaacaagacaaaaacacccaagaagtttttgcacaagtcaaacaaatttacaagacaccaccaattaaagattttggcggttttaattttagccagatactgccagatccatcaaaaccaagcaagaggtcatttattgaagatctactgttcaacaaagtgacacttgcagatgctggcttcatcaaacaatatggtgattgccttggtgatattgctgctagagacctcatttgtgcacaaaagtttaacggccttactgttttgccacctttgctcacagatgaaatgattgctcaatacacttctgcactgttagcaggtacaatcacttctggttggacttttggtgcaggtgctgcattacaaataccatttgctatgcaaatggcttataggtttaatggtattggagttacacagaatgttctctatgagaaccaaaaattgattgccaaccaatttaatagtgctattggcaaaattcaagactcactttcttccacagcaagtgcacttggaaaacttcaagatgtggtcaaccaaaatgcacaagctttaaacacgcttgttaaacaacttagctccaattttggtgcaatttcaagtgttttaaacgacatcctttcacgtcttgacaaagttgaggctgaagtgcaaattgataggttgatcacaggcagacttcaaagtttgcagacatatgtgactcaacaattaattagagctgcagaaatcagagcttctgctaatcttgctgctactaaaatgtcagagtgtgtacttggacaatcaaaaagagttgacttttgcggaaagggctatcatcttatgtcatttcctcagtcagcacctcatggtgtcgtctttttgcatgtgacttatgtccctgcacaagaaaagaacttcacaactgctcctgccatttgtcatgatggaaaagcacactttcctcgtgaaggtgtctttgtttcaaatggcacacactggtttgtaacacaaaggaatttttatgaaccacaaatcattactacagacaacacatttgtgtctggtaactgtgatgttgtaataggaattgtcaacaacacagtttatgatcctttgcaacctgaattagactcattcaaggaggagcttgataaatacttcaagaaccatacctcaccagatgttgatttaggtgacatctctggcattaatgcttcagttgtaaacattcagaaagaaatcgaccgcctcaatgaggttgccaagaatttaaatgaatctctcatcgatctccaagaacttggaaagtatgagcagtatataaaatggccatggtacatttggctaggttttatagctggcttgattgccatagtaatggtgacaattatgctttgctgtatgaccagttgctgtagttgtctcaagggctgttgttcttgtggatcctgctgcaaatttgacgaggacgactctgagccagtgctcaaaggagtcaaattacattacacataactatcacagcctctcctggaaagacagaaaatctaaacaatttatagcattctcattgctacctggccccgtaagaggcagtcatagctatggccgtgttggtcctaaggctacattggctgctgtctttattggtccatttattgtagcatgtatgctaggcattggcctagtttatttattgcaattgcaagttcaaatttttcatgttaaggataccatacgtgtgactggcaagccagccactgtgtcttatactacaagtacaccagtaacaccgagcgcgacgacgctcgatggtactacgtatactttaattagacccactagctcttatacaagagtttatcttggtactccaagaggttttgattatagtacatttgggcctaagaccctagattatgttactaatctaaacctcatcttaattctggtcgtccatatacttttaaggcattgtccaggcatatgaggccaacagccacatggatttggcatgtgagtgatgcatggttacgccgcacgcgggactttggtgtcattcgcctagaagatttttgttttcaatttaattatagccaaccccgagttggttattgtagagttcctttaaaggcttggtgtagcaaccagggtaaatttgcagcgcagtttaccctaaaaagttgcgaaaaaccaggtcacgaaaaatttattactagcttcacggcctacggcagaactgtccaacaggccgttagcaagttagtagaagaagctgttgattttattctttttagggccacgcagctcgaaagaaatgtttaatttattccttacagacacagtatggtatgtggggcagattatttttatattcgcagtgtgtttgatggtcaccataattgtggttgccttccttgcgtctatcaaactttgtattcaactttgcggtttatgtaatactttggtgctgtccccttctatttatttgtatgataggagtaagcagctttataagtactataatgaagaaatgagactgcccctattagaggtggatgatatctaatccaaacattatgagtagtactactcaggccccagagcccgtctatcaatggaccgccgacgaggcagttcaattccttaaggaatggaacttctcgttgggcattatactactctttattactatcatactacagttcggttacacgagccgtagcatgtttatttatgttgtgaaaatgataatcttgtggttaatgtggccactgactattgttttgtgtattttcaattgcgtgtatgcgctaaataatgtgtatcttggattttctatagtgtttactatagtgtccattgtaatctggatcatgtattttgtgaacagcataaggttgtttatcaggactggtagctggtggagcttcaaccccgaaacaaacaaccttatgtgtatagatatgaaaggtaccgtgtatgttagacccattattgaggattaccatacactaacagccactattattcgtggccacctctacatgcaaggtgttaagctaggcaccggtttctctttgtctgacttgcccgcttatgttacagttgctaaggtgtcacacctttgcacttataagcgcgcattcttagacaaggtagacggtgttagcggttttgctgtttatgtgaagtccaaggtcggaaattaccgactgccctcaaacaaaccgagtggcgcggacaccgcattgttgagaacctaatctaaactttaaggagagaatgaatcctatgtcggcgctcggtggtaacccctcgcgagaaagtcgggataggacactctctatcagaatggatgtcttgctgtcataacagatagagaaggttgtggcagaccctgtatcaattagttgaaagagattgcaaaatagagaatgtgtgagagaagttagcaaggtcctacgtctaaccataagaacggcgataggcgccccctgggaacagctcacatcagggtactattcctgcaatgccctagtaaatgaatgaagttgatcatggccaattggaagaatcacaaaaaaaaaaaaaaaaaaaacggccggttt

SEQ ID NO: 35 - DNA, 7341 bp, Artificial Sequence
  pcDNA34_syn_N
agtacttaatacgactcactataggctagccgccaccatggtgtctgataatggacctcaaaatcagcgaaatgcacctcgcattacgtttggtggaccatcagattcaactggcagtaaccagaatggagaacgaagtggtgcgcgatcaaaacaacgccgcccgcaaggtttacccaataatactgcgtcttggttcaccgctctcactcaacatggcaaggaagatttaaaattccctcgaggacaaggcgttccaattaacaccaatagcagtccagatgaccaaattggctactaccgccgcgccacaagacgaattcgtggtggtgatggtaaaatgaaagatctcagtccaagatggtatttctactatctaggaactgggccagaagctggacttccttatggtgctaacaaagatggcatcatatgggttgcaactgagggagccttgaatacaccaaaagatcacattggcaccagaaatcctgctaacaatgctgcaatcgtgctacaacttcctcaaggaacaacattaccaaaaggtttttacgcagaagggtctagaggtggaagtcaagcctcttctagatcatcatcacgtagtcgcaacagttcaagaaattcaactccaggttcaagtagaggaacttctcctgctagaatggctggaaatggaggtgatgctgctcttgctttgttactacttgacagattgaaccagcttgagagcaaaatgtctggtaaaggccaacaacaacaaggccaaactgtcactaagaaatctgctgctgaggcttctaagaagcctagacaaaaacgtactgccactaaagcatacaatgtaacacaagctttcggcagacgtggtccagaacaaactcaaggaaattttggggatcaggaactaatcagacaaggaactgattacaaacattggccgcaaattgcacaatttgctccttctgcttcagcgttctttggaatgtcgagaattggaatggaagtcacaccttcgggaacatggttgacctatacaggtgccatcaaattggatgacaaagatccaaatttcaaagatcaagtcattttgctgaataagcatattgacgcatacaaaacattcccaccaacagagcctaaaaaggacaaaaagaagaaggctgatgaaactcaagccttaccgcagagacagaagaaacagcaaactgtgactcttcttcctgctgcagatttggatgatttctccaaacaattgcaacaatccatgagcagtgctgactcaactcaggcctaagcggccgcttcgagcagacatgataagataaagggttcgatccctaccggttagtaatgagtttgatatctcgacaatcaacctctggattacaaaatttgtgaaagattgactggtattcttaactatgttgctccttttacgctatgtggatacgctgctttaatgcctttgtatcatgctattgcttcccgtatggctttcattttctcctccttgtataaatcctggttgctgtctctttatgaggagttgtggcccgttgtcaggcaacgtggcgtggtgtgcactgtgtttgctgacgcaacccccactggttggggcattgccaccacctgtcagctcctttccgggactttcgctttccccctccctattgccacggcggaactcatcgccgcctgccttgcccgctgctggacaggggctcggctgttgggcactgacaattccgtggtgttgtcggggaagctgacgtcctttccatggctgctcgcctgtgttgccacctggattctgcgcgggacgtccttctgctacgtcccttcggccctcaatccagcggaccttccttcccgcggcctgctgccggctctgcggcctcttccgcgtcttcgccttcgccctcagacgagtcggatctccctttgggccgcctccccgcctggaaacgggggaggctaactgaaacacggaaggagacaataccggaaggaacccgcgctatgacggcaataaaaagacagaataaaacgcacgggtgttgggtcgtttgttcataaacgcggggttcggtcccagggctggcactctgtcgataccccaccgagaccccattggggccaatacgcccgcgtttcttccttttccccaccccaccccccaagttcgggtgaaggcccagggctcgcagccaacgtcggggcggcaggccctgccatagcagatctgcgcagctggggctctagggggtatccccacgcgccctgtagcggcgcattaagcgcggcgggtgtggtggttacgcgcagcgtgaccgctacacttgccagcgccctagcgcccgctcctttcgctttcttcccttcctttctcgccacgttcgccggctttccccgtcaagctctaaatcggggcatccctttagggttccgatttagtgctttacggcacctcgaccccaaaaaacttgattagggtgatggttcacgtagtgggccatcgccctgatagacggtttttcgccctttgacgttggagtccacgttctttaatagtggactcttgttccaaactggaacaacactcaaccctatctcggtctattcttttgatttataagggattttggggatttcggcctattggttaaaaaatgagctgatttaacaaaaatttaacgcgaattaattctgtggaatgtgtgtcagttagggtgtggaaagtccccaggctccccagcaggcagaagtatgcaaagcatgcatctcaattagtcagcaaccaggtgtggaaagtccccaggctccccagcaggcagaagtatgcaaagcatgcatctcaattagtcagcaaccatagtcccgcccctaactccgcccatcccgcccctaactccgcccagttccgcccattctccgccccatggctgactaattttttttatttatgcagaggccgaggccgcctctgcctctgagctattccagaagtagtgaggaggcttttttggaggcctaggcttttgcaaaaagctcccgggagcttgtatatccattttcggatctgatcaagagacaggatgaggatcgtttcgcatgattgaacaagatggattgcacgcaggttctccggccgcttgggtggagaggctattcggctatgactgggcacaacagacaatcggctgctctgatgccgccgtgttccggctgtcagcgcaggggcgcccggttctttttgtcaagaccgacctgtccggtgccctgaatgaactgcaggacgaggcagcgcggctatcgtggctggccacgacgggcgttccttgcgcagctgtgctcgacgttgtcactgaagcgggaagggactggctgctattgggcgaagtgccggggcaggatctcctgtcatctcaccttgctcctgccgagaaagtatccatcatggctgatgcaatgcggcggctgcatacgcttgatccggctacctgcccattcgaccaccaagcgaaacatcgcatcgagcgagcacgtactcggatggaagccggtcttgtcgatcaggatgatctggacgaagagcatcaggggctcgcgccagccgaactgttcgccaggctcaaggcgcgcatgcccgacggcgaggatctcgtcgtgacccatggcgatgcctgcttgccgaatatcatggtggaaaatggccgcttttctggattcatcgactgtggccggctgggtgtggcggaccgctatcaggacatagcgttggctacccgtgatattgctgaagagcttggcggcgaatgggctgaccgcttcctcgtgctttacggtatcgccgctcccgattcgcagcgcatcgccttctatcgccttcttgacgagttcttctgagcgggactctggggttcgcgaaatgaccgaccaagcgacgcccaacctgccatcacgagatttcgattccaccgccgccttctatgaaaggttgggcttcggaatcgttttccgggacgccggctggatgatcctccagcgcggggatctcatgctggagttcttcgcccaccccaacttgtttattgcagcttataatggttacaaataaagcaatagcatcacaaatttcacaaataaagcatttttttcactgcattctagttgtggtttgtccaaactcatcaatgtatcttatcatgtctgtataccgtcgacctctagctagagcttggcgtaatcatggtcatagctgtttcctgtgtgaaattgttatccgctcacaattccacacaacatacgagccggaagcataaagtgtaaagcctggggtgcctaatgagtgagctaactcacattaattgcgttgcgctcactgcccgctttccagtcgggaaacctgtcgtgccagctgcattaatgaatcggccaacgcgcggggagaggcggtttgcgtattgggcgctcttccgcttcctcgctcactgactcgctgcgctcggtcgttcggctgcggcgagcggtatcagctcactcaaaggcggtaatacggttatccacagaatcaggggataacgcaggaaagaacatgtgagcaaaaggccagcaaaaggccaggaaccgtaaaaaggccgcgttgctggcgtttttccataggctccgcccccctgacgagcatcacaaaaatcgacgctcaagtcagaggtggcgaaacccgacaggactataaagataccaggcgtttccccctggaagctccctcgtgcgctctcctgttccgaccctgccgcttaccggatacctgtccgcctttctcccttcgggaagcgtggcgctttctcaatgctcacgctgtaggtatctcagttcggtgtaggtcgttcgctccaagctgggctgtgtgcacgaaccccccgttcagcccgaccgctgcgccttatccggtaactatcgtcttgagtccaacccggtaagacacgacttatcgccactggcagcagccactggtaacaggattagcagagcgaggtatgtaggcggtgctacagagttcttgaagtggtggcctaactacggctacactagaaggacagtatttggtatctgcgctctgctgaagccagttaccttcggaaaaagagttggtagctcttgatccggcaaacaaaccaccgctggtagcggtggtttttttgtttgcaagcagcagattacgcgcagaaaaaaaggatctcaagaagatcctttgatcttttctacggggtctgacgctcagtggaacgaaaactcacgttaagggattttggtcatgagattatcaaaaaggatcttcacctagatccttttaaattaaaaatgaagttttaaatcaatctaaagtatatatgagtaaacttggtctgacagttaccaatgcttaatcagtgaggcacctatctcagcgatctgtctatttcgttcatccatagttgcctgactccccgtcgtgtagataactacgatacgggagggcttaccatctggccccagtgctgcaatgataccgcgagacccacgctcaccggctccagatttatcagcaataaaccagccagccggaagggccgagcgcagaagtggtcctgcaactttatccgcctccatccagtctattaattgttgccgggaagctagagtaagtagttcgccagttaatagtttgcgcaacgttgttgccattgctacaggcatcgtggtgtcacgctcgtcgtttggtatggcttcattcagctccggttcccaacgatcaaggcgagttacatgatcccccatgttgtgcaaaaaagcggttagctccttcggtcctccgatcgttgtcagaagtaagttggccgcagtgttatcactcatggttatggcagcactgcataattctcttactgtcatgccatccgtaagatgcttttctgtgactggtgagtactcaaccaagtcattctgagaatagtgtatgcggcgaccgagttgctcttgcccggcgtcaatacgggataataccgcgccacatagcagaactttaaaagtgctcatcattggaaaacgttcttcggggcgaaaactctcaaggatcttaccgctgttgagatccagttcgatgtaacccactcgtgcacccaactgatcttcagcatcttttactttcaccagcgtttctgggtgagcaaaaacaggaaggcaaaatgccgcaaaaaagggaataagggcgacacggaaatgttgaatactcatactcttcctttttcaatattattgaagcatttatcagggttattgtctcatgagcggatacatatttgaatgtatttagaaaaataaacaaataggggttccgcgcacatttccccgaaaagtgccacctgacgtcgacggatcgggagatctcccgatcccctatggtcgactctcagtacaatctgctctgatgccgcatagttaagccagtatctgctccctgcttgtgtgttggaggtcgctgagtagtgcgcgagcaaaatttaagctacaacaaggcaaggcttgaccgacaattgcatgaagaatctgcttagggttaggcgttttgcgctgcttcgcgatgtacgggccagatatacgcgttgacattgattattgactagttattaatagtaatcaattacggggtcattagttcatagcccatatatggagttccgcgttacataacttacggtaaatggcccgcctggctgaccgcccaacgacccccgcccattgacgtcaataatgacgtatgttcccatagtaacgccaatagggactttccattgacgtcaatgggtggagtatttacggtaaactgcccacttggcagtacatcaagtgtatcatatgccaagtacgccccctattgacgtcaatgacggtaaatggcccgcctggcattatgcccagtacatgaccttatgggactttcctacttggcagtacatctacgtattagtcatcgctattaccatggtgatgcggttttggcagtacatcaatgggcgtggatagcggtttgactcacggggatttccaagtctccaccccattgacgtcaatgggagtttgttttggcaccaaaatcaacgggactttccaaaatgtcgtaacaactccgccccattgacgcaaatgggcggtaggcgtgtacggtgggaggtctatataagcagagctcgtttagtgaaccgtcagatcgcctggagacgccatccacgctgttttgacctccatagaagacaccgggaccgatccagcctccggactctagaggatcgaaccctt

SEQ ID NO: 36 - DNA, 6309 bp, Artificial Sequence
  pcDNA34_syn_E
agtacttaatacgactcactataggctagccgccaccatggtgtactcattcgtttcggaagagacaggtacgttaatagttaatagcgtacttctttttcttgctttcgtggtattcttgctagttacactagccattcttactgcgcttcgattgtgtgcgtactgttgcaatattgttaacgtgagtcttgtaaaaccttctttttacgtttactctcgtgttaaaaatctgaattcttctcgggttcctgatcttctggtctaagcggccgcttcgagcagacatgataagataaagggttcgatccctaccggttagtaatgagtttgatatctcgacaatcaacctctggattacaaaatttgtgaaagattgactggtattcttaactatgttgctccttttacgctatgtggatacgctgctttaatgcctttgtatcatgctattgcttcccgtatggctttcattttctcctccttgtataaatcctggttgctgtctctttatgaggagttgtggcccgttgtcaggcaacgtggcgtggtgtgcactgtgtttgctgacgcaacccccactggttggggcattgccaccacctgtcagctcctttccgggactttcgctttccccctccctattgccacggcggaactcatcgccgcctgccttgcccgctgctggacaggggctcggctgttgggcactgacaattccgtggtgttgtcggggaagctgacgtcctttccatggctgctcgcctgtgttgccacctggattctgcgcgggacgtccttctgctacgtcccttcggccctcaatccagcggaccttccttcccgcggcctgctgccggctctgcggcctcttccgcgtcttcgccttcgccctcagacgagtcggatctccctttgggccgcctccccgcctggaaacgggggaggctaactgaaacacggaaggagacaataccggaaggaacccgcgctatgacggcaataaaaagacagaataaaacgcacgggtgttgggtcgtttgttcataaacgcggggttcggtcccagggctggcactctgtcgataccccaccgagaccccattggggccaatacgcccgcgtttcttccttttccccaccccaccccccaagttcgggtgaaggcccagggctcgcagccaacgtcggggcggcaggccctgccatagcagatctgcgcagctggggctctagggggtatccccacgcgccctgtagcggcgcattaagcgcggcgggtgtggtggttacgcgcagcgtgaccgctacacttgccagcgccctagcgcccgctcctttcgctttcttcccttcctttctcgccacgttcgccggctttccccgtcaagctctaaatcggggcatccctttagggttccgatttagtgctttacggcacctcgaccccaaaaaacttgattagggtgatggttcacgtagtgggccatcgccctgatagacggtttttcgccctttgacgttggagtccacgttctttaatagtggactcttgttccaaactggaacaacactcaaccctatctcggtctattcttttgatttataagggattttggggatttcggcctattggttaaaaaatgagctgatttaacaaaaatttaacgcgaattaattctgtggaatgtgtgtcagttagggtgtggaaagtccccaggctccccagcaggcagaagtatgcaaagcatgcatctcaattagtcagcaaccaggtgtggaaagtccccaggctccccagcaggcagaagtatgcaaagcatgcatctcaattagtcagcaaccatagtcccgcccctaactccgcccatcccgcccctaactccgcccagttccgcccattctccgccccatggctgactaattttttttatttatgcagaggccgaggccgcctctgcctctgagctattccagaagtagtgaggaggcttttttggaggcctaggcttttgcaaaaagctcccgggagcttgtatatccattttcggatctgatcaagagacaggatgaggatcgtttcgcatgattgaacaagatggattgcacgcaggttctccggccgcttgggtggagaggctattcggctatgactgggcacaacagacaatcggctgctctgatgccgccgtgttccggctgtcagcgcaggggcgcccggttctttttgtcaagaccgacctgtccggtgccctgaatgaactgcaggacgaggcagcgcggctatcgtggctggccacgacgggcgttccttgcgcagctgtgctcgacgttgtcactgaagcgggaagggactggctgctattgggcgaagtgccggggcaggatctcctgtcatctcaccttgctcctgccgagaaagtatccatcatggctgatgcaatgcggcggctgcatacgcttgatccggctacctgcccattcgaccaccaagcgaaacatcgcatcgagcgagcacgtactcggatggaagccggtcttgtcgatcaggatgatctggacgaagagcatcaggggctcgcgccagccgaactgttcgccaggctcaaggcgcgcatgcccgacggcgaggatctcgtcgtgacccatggcgatgcctgcttgccgaatatcatggtggaaaatggccgcttttctggattcatcgactgtggccggctgggtgtggcggaccgctatcaggacatagcgttggctacccgtgatattgctgaagagcttggcggcgaatgggctgaccgcttcctcgtgctttacggtatcgccgctcccgattcgcagcgcatcgccttctatcgccttcttgacgagttcttctgagcgggactctggggttcgcgaaatgaccgaccaagcgacgcccaacctgccatcacgagatttcgattccaccgccgccttctatgaaaggttgggcttcggaatcgttttccgggacgccggctggatgatcctccagcgcggggatctcatgctggagttcttcgcccaccccaacttgtttattgcagcttataatggttacaaataaagcaatagcatcacaaatttcacaaataaagcatttttttcactgcattctagttgtggtttgtccaaactcatcaatgtatcttatcatgtctgtataccgtcgacctctagctagagcttggcgtaatcatggtcatagctgtttcctgtgtgaaattgttatccgctcacaattccacacaacatacgagccggaagcataaagtgtaaagcctggggtgcctaatgagtgagctaactcacattaattgcgttgcgctcactgcccgctttccagtcgggaaacctgtcgtgccagctgcattaatgaatcggccaacgcgcggggagaggcggtttgcgtattgggcgctcttccgcttcctcgctcactgactcgctgcgctcggtcgttcggctgcggcgagcggtatcagctcactcaaaggcggtaatacggttatccacagaatcaggggataacgcaggaaagaacatgtgagcaaaaggccagcaaaaggccaggaaccgtaaaaaggccgcgttgctggcgtttttccataggctccgcccccctgacgagcatcacaaaaatcgacgctcaagtcagaggtggcgaaacccgacaggactataaagataccaggcgtttccccctggaagctccctcgtgcgctctcctgttccgaccctgccgcttaccggatacctgtccgcctttctcccttcgggaagcgtggcgctttctcaatgctcacgctgtaggtatctcagttcggtgtaggtcgttcgctccaagctgggctgtgtgcacgaaccccccgttcagcccgaccgctgcgccttatccggtaactatcgtcttgagtccaacccggtaagacacgacttatcgccactggcagcagccactggtaacaggattagcagagcgaggtatgtaggcggtgctacagagttcttgaagtggtggcctaactacggctacactagaaggacagtatttggtatctgcgctctgctgaagccagttaccttcggaaaaagagttggtagctcttgatccggcaaacaaaccaccgctggtagcggtggtttttttgtttgcaagcagcagattacgcgcagaaaaaaaggatctcaagaagatcctttgatcttttctacggggtctgacgctcagtggaacgaaaactcacgttaagggattttggtcatgagattatcaaaaaggatcttcacctagatccttttaaattaaaaatgaagttttaaatcaatctaaagtatatatgagtaaacttggtctgacagttaccaatgcttaatcagtgaggcacctatctcagcgatctgtctatttcgttcatccatagttgcctgactccccgtcgtgtagataactacgatacgggagggcttaccatctggccccagtgctgcaatgataccgcgagacccacgctcaccggctccagatttatcagcaataaaccagccagccggaagggccgagcgcagaagtggtcctgcaactttatccgcctccatccagtctattaattgttgccgggaagctagagtaagtagttcgccagttaatagtttgcgcaacgttgttgccattgctacaggcatcgtggtgtcacgctcgtcgtttggtatggcttcattcagctccggttcccaacgatcaaggcgagttacatgatcccccatgttgtgcaaaaaagcggttagctccttcggtcctccgatcgttgtcagaagtaagttggccgcagtgttatcactcatggttatggcagcactgcataattctcttactgtcatgccatccgtaagatgcttttctgtgactggtgagtactcaaccaagtcattctgagaatagtgtatgcggcgaccgagttgctcttgcccggcgtcaatacgggataataccgcgccacatagcagaactttaaaagtgctcatcattggaaaacgttcttcggggcgaaaactctcaaggatcttaccgctgttgagatccagttcgatgtaacccactcgtgcacccaactgatcttcagcatcttttactttcaccagcgtttctgggtgagcaaaaacaggaaggcaaaatgccgcaaaaaagggaataagggcgacacggaaatgttgaatactcatactcttcctttttcaatattattgaagcatttatcagggttattgtctcatgagcggatacatatttgaatgtatttagaaaaataaacaaataggggttccgcgcacatttccccgaaaagtgccacctgacgtcgacggatcgggagatctcccgatcccctatggtcgactctcagtacaatctgctctgatgccgcatagttaagccagtatctgctccctgcttgtgtgttggaggtcgctgagtagtgcgcgagcaaaatttaagctacaacaaggcaaggcttgaccgacaattgcatgaagaatctgcttagggttaggcgttttgcgctgcttcgcgatgtacgggccagatatacgcgttgacattgattattgactagttattaatagtaatcaattacggggtcattagttcatagcccatatatggagttccgcgttacataacttacggtaaatggcccgcctggctgaccgcccaacgacccccgcccattgacgtcaataatgacgtatgttcccatagtaacgccaatagggactttccattgacgtcaatgggtggagtatttacggtaaactgcccacttggcagtacatcaagtgtatcatatgccaagtacgccccctattgacgtcaatgacggtaaatggcccgcctggcattatgcccagtacatgaccttatgggactttcctacttggcagtacatctacgtattagtcatcgctattaccatggtgatgcggttttggcagtacatcaatgggcgtggatagcggtttgactcacggggatttccaagtctccaccccattgacgtcaatgggagtttgttttggcaccaaaatcaacgggactttccaaaatgtcgtaacaactccgccccattgacgcaaatgggcggtaggcgtgtacggtgggaggtctatataagcagagctcgtttagtgaaccgtcagatcgcctggagacgccatccacgctgttttgacctccatagaagacaccgggaccgatccagcctccggactctagaggatcgaaccctt

SEQ ID NO: 37 - DNA, 6750 bp, Artificial Sequence
  pcDNA34_syn_M
agtacttaatacgactcactataggctagccgccaccatggtggcagattccaacggtactattaccgttgaggagctgaaaaagctccttgaacaatggaacctagtaataggtttcctattccttacatggatttgcctgctgcaatttgcctatgccaacaggaataggtttttgtacatcattaagttgattttcctctggctgttatggccagtaactttagcttgttttgtgcttgctgctgtttacagaataaattggatcaccggtggaattgctattgcaatggcttgtcttgtaggattgatgtggctaagctacttcattgcttctttcagactgtttgcgcgtacgcgttccatgtggtcattcaatccagaaactaacattcttctcaacgtgccactccatggaactattctgactagaccgcttctagaaagtgaactcgtaatcggagctgttatccttcgtggacatcttcgtattgctggacatcatctaggacgctgtgacatcaaggatctacctaaagaaatcactgttgctacatcacgaacgctttcttattacaaattgggagcttcacagcgtgtagcaggtgattcaggttttgctgcatatagtcgctacaggattggcaactataaattaaacacagaccattccagtagcagtgacaatattgctttgcttgtacagtaagcggccgcttcgagcagacatgataagataaagggttcgatccctaccggttagtaatgagtttgatatctcgacaatcaacctctggattacaaaatttgtgaaagattgactggtattcttaactatgttgctccttttacgctatgtggatacgctgctttaatgcctttgtatcatgctattgcttcccgtatggctttcattttctcctccttgtataaatcctggttgctgtctctttatgaggagttgtggcccgttgtcaggcaacgtggcgtggtgtgcactgtgtttgctgacgcaacccccactggttggggcattgccaccacctgtcagctcctttccgggactttcgctttccccctccctattgccacggcggaactcatcgccgcctgccttgcccgctgctggacaggggctcggctgttgggcactgacaattccgtggtgttgtcggggaagctgacgtcctttccatggctgctcgcctgtgttgccacctggattctgcgcgggacgtccttctgctacgtcccttcggccctcaatccagcggaccttccttcccgcggcctgctgccggctctgcggcctcttccgcgtcttcgccttcgccctcagacgagtcggatctccctttgggccgcctccccgcctggaaacgggggaggctaactgaaacacggaaggagacaataccggaaggaacccgcgctatgacggcaataaaaagacagaataaaacgcacgggtgttgggtcgtttgttcataaacgcggggttcggtcccagggctggcactctgtcgataccccaccgagaccccattggggccaatacgcccgcgtttcttccttttccccaccccaccccccaagttcgggtgaaggcccagggctcgcagccaacgtcggggcggcaggccctgccatagcagatctgcgcagctggggctctagggggtatccccacgcgccctgtagcggcgcattaagcgcggcgggtgtggtggttacgcgcagcgtgaccgctacacttgccagcgccctagcgcccgctcctttcgctttcttcccttcctttctcgccacgttcgccggctttccccgtcaagctctaaatcggggcatccctttagggttccgatttagtgctttacggcacctcgaccccaaaaaacttgattagggtgatggttcacgtagtgggccatcgccctgatagacggtttttcgccctttgacgttggagtccacgttctttaatagtggactcttgttccaaactggaacaacactcaaccctatctcggtctattcttttgatttataagggattttggggatttcggcctattggttaaaaaatgagctgatttaacaaaaatttaacgcgaattaattctgtggaatgtgtgtcagttagggtgtggaaagtccccaggctccccagcaggcagaagtatgcaaagcatgcatctcaattagtcagcaaccaggtgtggaaagtccccaggctccccagcaggcagaagtatgcaaagcatgcatctcaattagtcagcaaccatagtcccgcccctaactccgcccatcccgcccctaactccgcccagttccgcccattctccgccccatggctgactaattttttttatttatgcagaggccgaggccgcctctgcctctgagctattccagaagtagtgaggaggcttttttggaggcctaggcttttgcaaaaagctcccgggagcttgtatatccattttcggatctgatcaagagacaggatgaggatcgtttcgcatgattgaacaagatggattgcacgcaggttctccggccgcttgggtggagaggctattcggctatgactgggcacaacagacaatcggctgctctgatgccgccgtgttccggctgtcagcgcaggggcgcccggttctttttgtcaagaccgacctgtccggtgccctgaatgaactgcaggacgaggcagcgcggctatcgtggctggccacgacgggcgttccttgcgcagctgtgctcgacgttgtcactgaagcgggaagggactggctgctattgggcgaagtgccggggcaggatctcctgtcatctcaccttgctcctgccgagaaagtatccatcatggctgatgcaatgcggcggctgcatacgcttgatccggctacctgcccattcgaccaccaagcgaaacatcgcatcgagcgagcacgtactcggatggaagccggtcttgtcgatcaggatgatctggacgaagagcatcaggggctcgcgccagccgaactgttcgccaggctcaaggcgcgcatgcccgacggcgaggatctcgtcgtgacccatggcgatgcctgcttgccgaatatcatggtggaaaatggccgcttttctggattcatcgactgtggccggctgggtgtggcggaccgctatcaggacatagcgttggctacccgtgatattgctgaagagcttggcggcgaatgggctgaccgcttcctcgtgctttacggtatcgccgctcccgattcgcagcgcatcgccttctatcgccttcttgacgagttcttctgagcgggactctggggttcgcgaaatgaccgaccaagcgacgcccaacctgccatcacgagatttcgattccaccgccgccttctatgaaaggttgggcttcggaatcgttttccgggacgccggctggatgatcctccagcgcggggatctcatgctggagttcttcgcccaccccaacttgtttattgcagcttataatggttacaaataaagcaatagcatcacaaatttcacaaataaagcatttttttcactgcattctagttgtggtttgtccaaactcatcaatgtatcttatcatgtctgtataccgtcgacctctagctagagcttggcgtaatcatggtcatagctgtttcctgtgtgaaattgttatccgctcacaattccacacaacatacgagccggaagcataaagtgtaaagcctggggtgcctaatgagtgagctaactcacattaattgcgttgcgctcactgcccgctttccagtcgggaaacctgtcgtgccagctgcattaatgaatcggccaacgcgcggggagaggcggtttgcgtattgggcgctcttccgcttcctcgctcactgactcgctgcgctcggtcgttcggctgcggcgagcggtatcagctcactcaaaggcggtaatacggttatccacagaatcaggggataacgcaggaaagaacatgtgagcaaaaggccagcaaaaggccaggaaccgtaaaaaggccgcgttgctggcgtttttccataggctccgcccccctgacgagcatcacaaaaatcgacgctcaagtcagaggtggcgaaacccgacaggactataaagataccaggcgtttccccctggaagctccctcgtgcgctctcctgttccgaccctgccgcttaccggatacctgtccgcctttctcccttcgggaagcgtggcgctttctcaatgctcacgctgtaggtatctcagttcggtgtaggtcgttcgctccaagctgggctgtgtgcacgaaccccccgttcagcccgaccgctgcgccttatccggtaactatcgtcttgagtccaacccggtaagacacgacttatcgccactggcagcagccactggtaacaggattagcagagcgaggtatgtaggcggtgctacagagttcttgaagtggtggcctaactacggctacactagaaggacagtatttggtatctgcgctctgctgaagccagttaccttcggaaaaagagttggtagctcttgatccggcaaacaaaccaccgctggtagcggtggtttttttgtttgcaagcagcagattacgcgcagaaaaaaaggatctcaagaagatcctttgatcttttctacggggtctgacgctcagtggaacgaaaactcacgttaagggattttggtcatgagattatcaaaaaggatcttcacctagatccttttaaattaaaaatgaagttttaaatcaatctaaagtatatatgagtaaacttggtctgacagttaccaatgcttaatcagtgaggcacctatctcagcgatctgtctatttcgttcatccatagttgcctgactccccgtcgtgtagataactacgatacgggagggcttaccatctggccccagtgctgcaatgataccgcgagacccacgctcaccggctccagatttatcagcaataaaccagccagccggaagggccgagcgcagaagtggtcctgcaactttatccgcctccatccagtctattaattgttgccgggaagctagagtaagtagttcgccagttaatagtttgcgcaacgttgttgccattgctacaggcatcgtggtgtcacgctcgtcgtttggtatggcttcattcagctccggttcccaacgatcaaggcgagttacatgatcccccatgttgtgcaaaaaagcggttagctccttcggtcctccgatcgttgtcagaagtaagttggccgcagtgttatcactcatggttatggcagcactgcataattctcttactgtcatgccatccgtaagatgcttttctgtgactggtgagtactcaaccaagtcattctgagaatagtgtatgcggcgaccgagttgctcttgcccggcgtcaatacgggataataccgcgccacatagcagaactttaaaagtgctcatcattggaaaacgttcttcggggcgaaaactctcaaggatcttaccgctgttgagatccagttcgatgtaacccactcgtgcacccaactgatcttcagcatcttttactttcaccagcgtttctgggtgagcaaaaacaggaaggcaaaatgccgcaaaaaagggaataagggcgacacggaaatgttgaatactcatactcttcctttttcaatattattgaagcatttatcagggttattgtctcatgagcggatacatatttgaatgtatttagaaaaataaacaaataggggttccgcgcacatttccccgaaaagtgccacctgacgtcgacggatcgggagatctcccgatcccctatggtcgactctcagtacaatctgctctgatgccgcatagttaagccagtatctgctccctgcttgtgtgttggaggtcgctgagtagtgcgcgagcaaaatttaagctacaacaaggcaaggcttgaccgacaattgcatgaagaatctgcttagggttaggcgttttgcgctgcttcgcgatgtacgggccagatatacgcgttgacattgattattgactagttattaatagtaatcaattacggggtcattagttcatagcccatatatggagttccgcgttacataacttacggtaaatggcccgcctggctgaccgcccaacgacccccgcccattgacgtcaataatgacgtatgttcccatagtaacgccaatagggactttccattgacgtcaatgggtggagtatttacggtaaactgcccacttggcagtacatcaagtgtatcatatgccaagtacgccccctattgacgtcaatgacggtaaatggcccgcctggcattatgcccagtacatgaccttatgggactttcctacttggcagtacatctacgtattagtcatcgctattaccatggtgatgcggttttggcagtacatcaatgggcgtggatagcggtttgactcacggggatttccaagtctccaccccattgacgtcaatgggagtttgttttggcaccaaaatcaacgggactttccaaaatgtcgtaacaactccgccccattgacgcaaatgggcggtaggcgtgtacggtgggaggtctatataagcagagctcgtttagtgaaccgtcagatcgcctggagacgccatccacgctgttttgacctccatagaagacaccgggaccgatccagcctccggactctagaggatcgaaccctt

SEQ ID NO: 38 - DNA, 9905 bp, Artificial Sequence
  pcDNA34_syn_S
agtacttaatacgactcactataggctagcgccgccaccatggtgtttgtttttcttgttttattgccactagtctctagtcagtgtgttaatcttacaaccagaactcaattaccccctgcatacactaattctttcacacgtggtgtttattaccctgacaaagttttcagatcctcagttttacattcaactcaggacttgttcttacctttcttttccaatgttacttggttccatgctatacatgtctctgggaccaatggtactaagaggtttgataaccctgtcctaccatttaatgatggtgtttactttgcttccactgagaagtctaacataataagaggctggatttttggtactactttagattcgaaaacccagtccctacttattgttaataacgctactaatgttgttatcaaagtctgtgaatttcaattttgtaacgatccatttttgggtgtttattaccacaaaaacaacaaaagttggatggaaagtgagttcagagtttattctagtgcgaataattgcacttttgaatacgtctctcagccttttcttatggaccttgaaggaaaacagggtaatttcaaaaatcttagggaatttgtgttcaagaatattgatggttacttcaagatatactctaagcacacgcctattaatttagtgcgtgatctccctcagggtttttcggctttagaaccattggtagatttgccaataggtattaacatcactaggtttcaaactttacttgctttacatagaagttatttaactcctggtgattcttcttcaggttggacagctggtgctgcagcttattatgtgggttatcttcaacctaggacttttctactgaagtacaatgaaaatggaaccattacagatgctgtagactgtgcacttgaccctctctcagaaacaaagtgtacgttgaaatccttcactgtagaaaaaggaatctatcaaacttctaactttagagtccaaccaacagaatctattgttagatttcctaacatcacaaacttgtgcccttttggtgaagtttttaacgccaccagatttgcatctgtttatgcttggaacaggaagagaatcagcaactgtgttgctgattattctgtcctgtataattccgcatcattttccacttttaagtgttatggagtgtctcctactaaattaaatgatctctgctttactaatgtctatgcagattcatttgtaattagaggtgatgaagtcagacaaatcgctccagggcaaactggaaagattgctgattataactacaaattaccagatgattttacaggctgcgttatagcttggaattctaacaatcttgattctaaggttggtggtaattataattacctgtacagattgtttaggaagtctaatctcaaaccttttgagagagatatttcaactgaaatctatcaggccggtagcacaccttgtaatggtgttgaaggttttaattgttactttcctctgcaatcatatggtttccaacccactaatggtgttggttaccaaccatacagagtagtagtactttcttttgaacttctacatgcaccagcaactgtttgtggacctaaaaagtctactaatttggttaagaacaagtgtgtcaatttcaacttcaatggtttaacaggcacaggtgttcttactgagtctaacaaaaagtttctgcctttccaacaatttggcagagacattgctgacactactgatgctgttcgtgatccacaaacacttgagattcttgacattacaccatgttcttttggtggtgtcagtgttataacaccaggaacaaatacttctaaccaggttgctgttctttatcaggatgttaactgcacagaagtccctgttgctattcatgcagatcaacttactcctacttggcgtgtttattctacaggttctaatgtttttcaaacacgtgcaggctgtttaataggggctgaacatgtcaacaactcatatgagtgtgacatacccattggtgcaggtatatgcgctagttatcagactcagactaattctcctcggagagcaagaagtgtagctagtcaatccatcattgcctacactatgtcacttggtgcagaaaattcagttgcttactctaataactctattgccatacccacaaattttactattagcgttaccacagaaattctaccagtgtctatgaccaagacatcagtagattgtacaatgtacatttgtggtgattcaactgaatgcagcaatcttttgttgcaatatggcagtttttgtacacaattaaaccgtgctttaactggaatagctgttgaacaagacaaaaacacccaagaagtttttgcacaagtcaaacaaatttacaagacaccaccaattaaagattttggcggttttaattttagccagatactgccagatccatcaaaaccaagcaagaggtcatttattgaagatctactgttcaacaaagtgacacttgcagatgctggcttcatcaaacaatatggtgattgccttggtgatattgctgctagagacctcatttgtgcacaaaagtttaacggccttactgttttgccacctttgctcacagatgaaatgattgctcaatacacttctgcactgttagcaggtacaatcacttctggttggacttttggtgcaggtgctgcattacaaataccatttgctatgcaaatggcttataggtttaatggtattggagttacacagaatgttctctatgagaaccaaaaattgattgccaaccaatttaatagtgctattggcaaaattcaagactcactttcttccacagcaagtgcacttggaaaacttcaagatgtggtcaaccaaaatgcacaagctttaaacacgcttgttaaacaacttagctccaattttggtgcaatttcaagtgttttaaacgacatcctttcacgtcttgacaaagttgaggctgaagtgcaaattgataggttgatcacaggcagacttcaaagtttgcagacatatgtgactcaacaattaattagagctgcagaaatcagagcttctgctaatcttgctgctactaaaatgtcagagtgtgtacttggacaatcaaaaagagttgacttttgcggaaagggctatcatcttatgtcatttcctcagtcagcacctcatggtgtcgtctttttgcatgtgacttatgtccctgcacaagaaaagaacttcacaactgctcctgccatttgtcatgatggaaaagcacactttcctcgtgaaggtgtctttgtttcaaatggcacacactggtttgtaacacaaaggaatttttatgaaccacaaatcattactacagacaacacatttgtgtctggtaactgtgatgttgtaataggaattgtcaacaacacagtttatgatcctttgcaacctgaattagactcattcaaggaggagcttgataaatacttcaagaaccatacctcaccagatgttgatttaggtgacatctctggcattaatgcttcagttgtaaacattcagaaagaaatcgaccgcctcaatgaggttgccaagaatttaaatgaatctctcatcgatctccaagaacttggaaagtatgagcagtatataaaatggccatggtacatttggctaggttttatagctggcttgattgccatagtaatggtgacaattatgctttgctgtatgaccagttgctgtagttgtctcaagggctgttgttcttgtggatcctgctgcaaatttgacgaggacgactctgagccagtgctcaaaggagtcaaattacattacacataagcggccgcttcgagcagacatgataagataaagggttcgatccctaccggttagtaatgagtttgatatctcgacaatcaacctctggattacaaaatttgtgaaagattgactggtattcttaactatgttgctccttttacgctatgtggatacgctgctttaatgcctttgtatcatgctattgcttcccgtatggctttcattttctcctccttgtataaatcctggttgctgtctctttatgaggagttgtggcccgttgtcaggcaacgtggcgtggtgtgcactgtgtttgctgacgcaacccccactggttggggcattgccaccacctgtcagctcctttccgggactttcgctttccccctccctattgccacggcggaactcatcgccgcctgccttgcccgctgctggacaggggctcggctgttgggcactgacaattccgtggtgttgtcggggaagctgacgtcctttccatggctgctcgcctgtgttgccacctggattctgcgcgggacgtccttctgctacgtcccttcggccctcaatccagcggaccttccttcccgcggcctgctgccggctctgcggcctcttccgcgtcttcgccttcgccctcagacgagtcggatctccctttgggccgcctccccgcctggaaacgggggaggctaactgaaacacggaaggagacaataccggaaggaacccgcgctatgacggcaataaaaagacagaataaaacgcacgggtgttgggtcgtttgttcataaacgcggggttcggtcccagggctggcactctgtcgataccccaccgagaccccattggggccaatacgcccgcgtttcttccttttccccaccccaccccccaagttcgggtgaaggcccagggctcgcagccaacgtcggggcggcaggccctgccatagcagatctgcgcagctggggctctagggggtatccccacgcgccctgtagcggcgcattaagcgcggcgggtgtggtggttacgcgcagcgtgaccgctacacttgccagcgccctagcgcccgctcctttcgctttcttcccttcctttctcgccacgttcgccggctttccccgtcaagctctaaatcggggcatccctttagggttccgatttagtgctttacggcacctcgaccccaaaaaacttgattagggtgatggttcacgtagtgggccatcgccctgatagacggtttttcgccctttgacgttggagtccacgttctttaatagtggactcttgttccaaactggaacaacactcaaccctatctcggtctattcttttgatttataagggattttggggatttcggcctattggttaaaaaatgagctgatttaacaaaaatttaacgcgaattaattctgtggaatgtgtgtcagttagggtgtggaaagtccccaggctccccagcaggcagaagtatgcaaagcatgcatctcaattagtcagcaaccaggtgtggaaagtccccaggctccccagcaggcagaagtatgcaaagcatgcatctcaattagtcagcaaccatagtcccgcccctaactccgcccatcccgcccctaactccgcccagttccgcccattctccgccccatggctgactaattttttttatttatgcagaggccgaggccgcctctgcctctgagctattccagaagtagtgaggaggcttttttggaggcctaggcttttgcaaaaagctcccgggagcttgtatatccattttcggatctgatcaagagacaggatgaggatcgtttcgcatgattgaacaagatggattgcacgcaggttctccggccgcttgggtggagaggctattcggctatgactgggcacaacagacaatcggctgctctgatgccgccgtgttccggctgtcagcgcaggggcgcccggttctttttgtcaagaccgacctgtccggtgccctgaatgaactgcaggacgaggcagcgcggctatcgtggctggccacgacgggcgttccttgcgcagctgtgctcgacgttgtcactgaagcgggaagggactggctgctattgggcgaagtgccggggcaggatctcctgtcatctcaccttgctcctgccgagaaagtatccatcatggctgatgcaatgcggcggctgcatacgcttgatccggctacctgcccattcgaccaccaagcgaaacatcgcatcgagcgagcacgtactcggatggaagccggtcttgtcgatcaggatgatctggacgaagagcatcaggggctcgcgccagccgaactgttcgccaggctcaaggcgcgcatgcccgacggcgaggatctcgtcgtgacccatggcgatgcctgcttgccgaatatcatggtggaaaatggccgcttttctggattcatcgactgtggccggctgggtgtggcggaccgctatcaggacatagcgttggctacccgtgatattgctgaagagcttggcggcgaatgggctgaccgcttcctcgtgctttacggtatcgccgctcccgattcgcagcgcatcgccttctatcgccttcttgacgagttcttctgagcgggactctggggttcgcgaaatgaccgaccaagcgacgcccaacctgccatcacgagatttcgattccaccgccgccttctatgaaaggttgggcttcggaatcgttttccgggacgccggctggatgatcctccagcgcggggatctcatgctggagttcttcgcccaccccaacttgtttattgcagcttataatggttacaaataaagcaatagcatcacaaatttcacaaataaagcatttttttcactgcattctagttgtggtttgtccaaactcatcaatgtatcttatcatgtctgtataccgtcgacctctagctagagcttggcgtaatcatggtcatagctgtttcctgtgtgaaattgttatccgctcacaattccacacaacatacgagccggaagcataaagtgtaaagcctggggtgcctaatgagtgagctaactcacattaattgcgttgcgctcactgcccgctttccagtcgggaaacctgtcgtgccagctgcattaatgaatcggccaacgcgcggggagaggcggtttgcgtattgggcgctcttccgcttcctcgctcactgactcgctgcgctcggtcgttcggctgcggcgagcggtatcagctcactcaaaggcggtaatacggttatccacagaatcaggggataacgcaggaaagaacatgtgagcaaaaggccagcaaaaggccaggaaccgtaaaaaggccgcgttgctggcgtttttccataggctccgcccccctgacgagcatcacaaaaatcgacgctcaagtcagaggtggcgaaacccgacaggactataaagataccaggcgtttccccctggaagctccctcgtgcgctctcctgttccgaccctgccgcttaccggatacctgtccgcctttctcccttcgggaagcgtggcgctttctcaatgctcacgctgtaggtatctcagttcggtgtaggtcgttcgctccaagctgggctgtgtgcacgaaccccccgttcagcccgaccgctgcgccttatccggtaactatcgtcttgagtccaacccggtaagacacgacttatcgccactggcagcagccactggtaacaggattagcagagcgaggtatgtaggcggtgctacagagttcttgaagtggtggcctaactacggctacactagaaggacagtatttggtatctgcgctctgctgaagccagttaccttcggaaaaagagttggtagctcttgatccggcaaacaaaccaccgctggtagcggtggtttttttgtttgcaagcagcagattacgcgcagaaaaaaaggatctcaagaagatcctttgatcttttctacggggtctgacgctcagtggaacgaaaactcacgttaagggattttggtcatgagattatcaaaaaggatcttcacctagatccttttaaattaaaaatgaagttttaaatcaatctaaagtatatatgagtaaacttggtctgacagttaccaatgcttaatcagtgaggcacctatctcagcgatctgtctatttcgttcatccatagttgcctgactccccgtcgtgtagataactacgatacgggagggcttaccatctggccccagtgctgcaatgataccgcgagacccacgctcaccggctccagatttatcagcaataaaccagccagccggaagggccgagcgcagaagtggtcctgcaactttatccgcctccatccagtctattaattgttgccgggaagctagagtaagtagttcgccagttaatagtttgcgcaacgttgttgccattgctacaggcatcgtggtgtcacgctcgtcgtttggtatggcttcattcagctccggttcccaacgatcaaggcgagttacatgatcccccatgttgtgcaaaaaagcggttagctccttcggtcctccgatcgttgtcagaagtaagttggccgcagtgttatcactcatggttatggcagcactgcataattctcttactgtcatgccatccgtaagatgcttttctgtgactggtgagtactcaaccaagtcattctgagaatagtgtatgcggcgaccgagttgctcttgcccggcgtcaatacgggataataccgcgccacatagcagaactttaaaagtgctcatcattggaaaacgttcttcggggcgaaaactctcaaggatcttaccgctgttgagatccagttcgatgtaacccactcgtgcacccaactgatcttcagcatcttttactttcaccagcgtttctgggtgagcaaaaacaggaaggcaaaatgccgcaaaaaagggaataagggcgacacggaaatgttgaatactcatactcttcctttttcaatattattgaagcatttatcagggttattgtctcatgagcggatacatatttgaatgtatttagaaaaataaacaaataggggttccgcgcacatttccccgaaaagtgccacctgacgtcgacggatcgggagatctcccgatcccctatggtcgactctcagtacaatctgctctgatgccgcatagttaagccagtatctgctccctgcttgtgtgttggaggtcgctgagtagtgcgcgagcaaaatttaagctacaacaaggcaaggcttgaccgacaattgcatgaagaatctgcttagggttaggcgttttgcgctgcttcgcgatgtacgggccagatatacgcgttgacattgattattgactagttattaatagtaatcaattacggggtcattagttcatagcccatatatggagttccgcgttacataacttacggtaaatggcccgcctggctgaccgcccaacgacccccgcccattgacgtcaataatgacgtatgttcccatagtaacgccaatagggactttccattgacgtcaatgggtggagtatttacggtaaactgcccacttggcagtacatcaagtgtatcatatgccaagtacgccccctattgacgtcaatgacggtaaatggcccgcctggcattatgcccagtacatgaccttatgggactttcctacttggcagtacatctacgtattagtcatcgctattaccatggtgatgcggttttggcagtacatcaatgggcgtggatagcggtttgactcacggggatttccaagtctccaccccattgacgtcaatgggagtttgttttggcaccaaaatcaacgggactttccaaaatgtcgtaacaactccgccccattgacgcaaatgggcggtaggcgtgtacggtgggaggtctatataagcagagctcgtttagtgaaccgtcagatcgcctggagacgccatccacgctgttttgacctccatagaagacaccgggaccgatccagcctccggactctagaggatcgaaccctt

SEQ ID NO: 39 - DNA, 40556 bp, Artificial Sequence
  pMR10Y_COVAX191_delN
atgaatcggacgtttgaccggaaggcatacaggcaagaactgatcgacgcggggttttccgccgaggatgccgaaaccatcgcaagccgcaccgtcatgcgtgcgccccgcgaaaccttccagtccgtcggctcgatggtccagcaagctacggccaagatcgagcgcgacagcgtgcaactggctccccctgccctgcccgcgccatcggccgccgtggagcgttcgcgtcgtctcgaacaggaggcggcaggtttggcgaagtcgatgaccatcgacacgcgaggaactatgacgaccaagaagcgaaaaaccgccggcgaggacctggcaaaacaggtcagcgaggccaagcaggccgcgttgctgaaacacacgaagcagcagatcaaggaaatgcagctttccttgttcgatattgcgccgtggccggacacgatgcgagcgatgccaaacgacacggcccgctctgccctgttcaccacgcgcaacaagaaaatcccgcgcgaggcgctgcaaaacaaggtcattttccacgtcaacaaggacgtgaagatcacctacaccggcgtcgagctgcgggccgacgatgacgaactggtgtggcagcaggtgttggagtacgcgaagcgcacccctatcggcgagccgatcaccttcacgttctacgagctttgccaggacctgggctggtcgatcaatggccggtattacacgaaggccgaggaatgcctgtcgcgcctacaggcgacggcgatgggcttcacgtccgaccgcgttgggcacctggaatcggtgtcgctgctgcaccgcttccgcgtcctggaccgtggcaagaaaacgtcccgttgccaggtcctgatcgacgaggaaatcgtcgtgctgtttgctggcgaccactacacgaaattcatatgggagaagtaccgcaagctgtcgccgacggcccgacggatgttcgactatttcagctcgcaccgggagccgtacccgctcaagctggaaaccttccgcctcatgtgcggatcggattccacccgcgtgaagaagtggcgcgagcaggtcggcgaagcctgcgaagagttgcgaggcagcggcctggtggaacacgcctgggtcaatgatgacctggtgcattgcaaacgctagggccttgtggggtcagttccggctgggggttcagcagccactcgatcgaggtcccaatacgcaaaccgcctctccccgcgcgttggccgattcattaatgcagctggcacgacaggtttcccgactggaaagcgggcagtgagcgcaacgcaattaatgtgagttagctcactcattaggcaccccaggctttacactttatgcttccggctcgtatgttgtgtggaattgtgagcggataacaatttcacacaggaaacagctatgaccatgattacgccaagcttccatgggatatcgagatctcctgcagagctctagagtcgagactagtctcgacgggcccggtaccccctcgagggggccgcacttaagttacgcgtggatcgtggagctttcgggttttaactataacggtcctaaggtagcgaactcgggtcttgccttaatcccaacaaccggattatctacacggatttcaatagctgatatagcgaatcaccgagattaattaataatacgactcactatagtataagagtgattggcgtccgtacgtaccctctcaactctaaaactcttgtagtttaaatctaatctaaactttataaacggcacttcctgcgtgtccatgcccgcgggcctggtcttgtcatagtgctgacatttgtagttccttgactttcgttctctgccagtgacgtgtccattcggcgccagcagcccacccataggttgcataatggcaaagatgggcaaatacggcctgggcttcaaatgggccccagaatttccatggatgcttccgaacgcatcggagaagttgggtaaccctgagaggtcagaggaggatgggttttgcccctctgctgcgcaagaaccgaaagttaaaggaaaaactttggttaatcacgtgagggtgaattgtagccggcttccagctttggaatgctgtgttcagtctgccataatccgtgatatttttgtagatgaggatccccagaaggtggaggcctcaactatgatggcattgcagttcggtagtgccgtcttggttaagccatccaagcgcttgtctattcaggcatggactaatttgggtgtgcttcccaaaacagctgccatggggttgttcaagcgcgtctgcctgtgtaacaccagggagtgctcttgtgacgcccacgtggcctttcacctttttacggtccaacccgatggtgtatgcctgggtaatggccgttttataggctggttcgttccagtcacagccataccggagtatgcgaagcagtggttgcaaccctggtccatccttcttcgtaagggtggtaacaaagggtctgtgacatccggccacttccgccgcgctgttaccatgcctgtgtatgactttaatgtagaggatgcttgtgaggaggttcatcttaacccgaagggtaagtactcctgcaaggcgtatgccctgctgaagggctatcgcggtgttaagcccatcctgtttgtggaccagtatggttgcgactatactggatgtctcgccaagggtcttgaggactatggcgatctcaccttgagtgagatgaaggagttgttccctgtgtggcgtgactccttggatagtgaagtccttgtggcttggcacgttgatcgagatcctcgggctgctatgcgtctgcagactcttgctactgtacgttgcattgattatgtgggccaaccgaccgaggatgtggtggatggagatgtggtagtgcgtgagcctgctcatcttctcgcagccaatgccattgttaaaagactcccccgtttggtggagactatgctgtatacggattcgtccgttacagaattctgttataaaaccaagctgtgtgaatgcggttttatcacgcagtttggctatgtggattgttgtggtgacacctgtgattttcgtgggtgggttgccggcaatatgatggatggctttccatgtccagggtgtaccaaaaattatatgccctgggaattggaggcccagtcatcaggtgttataccagaaggaggtgttctattcactcagagcactgatacagtgaatcgtgagtcctttaagctctacggtcatgctgttgtgccttttggttctgctgtgtattggagcccttgcccaggtatgtggcttccagtaatttggtcgtcggttaagtcatactctggtttgacttatacaggagtagttggttgtaaggcaattgttcaagagacagacgctatatgtcgttctctgtatatggattatgtccagcacaagtgtggcaatctcgagcagagagctatccttggattggacgatgtctatcatagacagttgcttgtgaataggggtgactatagtctcctccttgagaatgtggatttgtttgttaagcggcgcgctgaatttgcttgcaaattcgccacctgtggagatggtcttgtacccctcctactagatggtttagtgccccgcagttattatttgattaagagtggtcaagctttcacctctatgatggttaattttagccatgaggtgactgacatgtgtatggacatggctttattgttcatgcatgatgttaaagtggccactaagtatgttaagaaggttactggcaaactggccgtgcgctttaaagcgttgggtgtagccgttgtcagaaaaattactgaatggtttgatttagccgtggacattgctgctagtgccgctggatggctttgctaccagctggtaaatggcttatttgcagtggccaatggtgttataacctttgtacaggaggtgcctgagcttgtcaagaattttgttgacaagttcaaggcatttttcaaggttttgatcgactctatgtcggtttctatcttgtctggacttactgttgtcaagactgcctcaaatagggtgtgtcttgctggcagtaaggtttatgaagttgtgcagaaatctttgtctgcatatgttatgcctgtgggttgcagcgaagccacttgtttggtgggtgagattgaacctgcagtttttgaagatgatgttgttgatgtggttaaagccccattaacatatcaaggctgttgtaagccacccacttctttcgagaagatttgtattgtggataaattgtatatggccaagtgtggtgatcaattttaccctgtggttgttgataacgacactgttggcgtgttagatcagtgctggaggtttccctgtgcgggcaagaaagtcgagtttaacgacaagcccaaagtcaggaagataccctccacccgtaagattaagatcaccttcgcactggatgcgacctttgatagtgttctttcgaaggcgtgttcagagtttgaagttgataaagatgttacattggatgagctgcttgatgttgtgcttgacgcagttgagagtacgctcagcccttgtaaggagcatgatgtgataggcacaaaagtttgtgctttacttgataggttggcaggagattatgtctatctttttgatgagggaggcgatgaagtgatcgccccgaggatgtattgttccttttctgctcctgatgacgaggactgcgttgcagcggatgttgtagatgcagatgaaaaccaagatgatgatgccgaggactcagcagtccttgtcgctgatacccaagaagaggacggcgttgccaaggggcaggttgaggcggattcggaaatttgcgttgcgcatactggtagtcaagaagaattggctgagcctgatgctgtcggatctcaaactcccatcgcctctgctgaggaaaccgaagtcggagaggcaagcgacagggaagggattgctgaggcgaaggcaactgtgtgtgctgatgctgtagatgcctgccccgatcaagtggaggcatttgaaattgaaaaggtcgaggactctatcttggatgagcttcaaactgaacttaatgcgccagcggacaagacctatgaggatgtcttggcattcgatgccgtatgctcagaggcgttgtctgcattctatgctgtgccgagtgatgagacgcactttaaagtgtgtggattctattcgcctgctatagagcgcactaattgttggctgcgttctactttgatagtaatgcagagtctacctttggaatttaaagacttggagatgcaaaagctctggttgtcttacaaggccggctatgaccaatgctttgtggacaaactagttaagagcgtgcccaagtctattatccttccacaaggtggttatgtggcagattttgcctatttctttctaagccagtgtagctttaaagcttatgctaactggcgttgtttagagtgtgacatggagttaaagcttcaaggcttggacgccatgtttttctatggggacgttgtgtctcatatgtgcaagtgtggtaatagcatgaccttgttgtctgcagatataccctacactttgcattttggagtgcgagatgataagttttgcgctttttacacgccaagaaaggtctttagggctgcttgtgcggtagatgttaatgattgtcactctatggctgtagtagagggcaagcaaattgatggtaaagtggttaccaaatttattggtgacaaatttgattttatggtgggttacgggatgacatttagtatgtctccttttgaactcgcccagttatatggttcatgtataacaccaaatgtttgttttgttaaaggagatgttataaaggttgttcgcttagttaatgctgaagtcattgttaaccctgctaatgggcgtatggctcatggtgccggcgtcgccggcgccatagctgaaaaggcgggcagtgcttttattaaagaaacctccgatatggtgaaggctcagggcgtttgccaggttggtgaatgctatgaatctgccggtggtaagttatgtaaaaaggtgcttaacattgtagggccagatgcgcgagggcatggcaagcaatgctattcacttttagagcgtgcttatcagcatattaataagtgtgacaatgttgtcactactttaatttcggctggtatatttagtgtgcctactgatgtctccctaacttacttacttggtgtagtgacaaagaatgtcattcttgtcagtaacaaccaggatgattttgatgtgatagagaagtgtcaggtgacctccgttgctggtaccaaagcgctatcacttcaattggccaaaaatttgtgccgtgatgtaaagtttgtgacgaatgcatgtagttcgctttttagtgaatcttgctttgtctcaagctatgatgtgttgcaggaagttgaagcgctgcgacatgatatacaattggatgatgatgctcgtgtctttgtgcaggctaatatggactgtctgcccacagactggcgtctcgttaacaaatttgatagtgttgatggtgttagaaccattaagtattttgaatgcccgggcgggatttttgtatccagccagggcaaaaagtttggttatgttcagaatggttcatttaaggaggcgagtgttagccaaataagggctttactcgctaataaggttgatgtcttgtgtactgttgatggtgttaacttccgctcctgctgcgtagcagagggtgaagtttttggcaagacattaggttcagtcttttgtgatggcataaatgtcaccaaagttaggtgtagtgccatttacaagggtaaggttttctttcagtacagtgatttgtccgaggcagatcttgtggctgttaaagatgcctttggttttgatgaaccacaactgctgaagtactacactatgcttggcatgtgtaagtggccagtagttgtttgtggcaattattttgctttcaagcagtcaaataataattgctacatcaacgtggcatgtttaatgctgcaacacttgagtttaaagtttcctaagtggcaatggcaagaggcttggaacgagttccgctctggtaaaccactaaggtttgtgtccttggtattagcaaagggcagctttaaatttaatgaaccttctgattctatcgattttatgcgtgtggtgctacgtgaagcagatttgagtggtgccacgtgcaatttggaatttgtttgtaaatgtggtgtgaagcaagagcagcgcaaaggtgttgacgctgttatgcattttggtacgttggataaaggtgatcttgtcaggggttataatatcgcatgtacgtgcggtagtaaacttgtgcattgcacccaatttaacgtaccatttttaatttgctccaacacaccagagggtaggaaactgcccgacgatgttgttgcagctaatatttttactggtggtagtgtgggccattacacgcatgtgaaatgtaaacccaagtaccagctttatgatgcttgtaatgttaataaggtttcggaggctaagggtaattttaccgattgcctctaccttaaaaatttaaagcaaaccttctcgtctgtgctgacgactttttatttagatgacgtaaagtgtgtggagtataagccagatttatcgcagtattactgtgagtctggtaaatattatacaaaacccattattaaggcccaatttagaacatttgagaaggttgatggtgtctataccaactttaaattggtgggacatagtattgctgaaaaactcaatgctaagctgggatttgattgtaattctccctttgtggagtataaaattacagagtggccaacagctactggagatgtggtgttggctagtgatgatttgtatgtaagtcggtacttaagcgggtgcattacttttggtaaaccggttgtctggcttggccatgaggaagcatcgctgaaatctctcacatattttaatagacctagtgtcgtttgtgaaaataaatttaacgtgttgcccgttgatgtcagtgaacccacggacaaggggcctgtgcctgctgcagtccttgttaccggcgtccctggagctgatgcgtcagctggtgccggtattgccaaggagcaaaaagcctgtgcttctgctagtgtggaggatcaggttgttacggaggttcgtcaagagccatctgtttcagctgctgatgtcaaagaggttaaattgaatggtgttaaaaagcctgttaaggtggaaggtagtgtggttgttaatgatcccactagcgaaaccaaagttgttaaaagtttgtctattgttgatgtctatgatatgttcctgacagggtgtaagtatgtggtttggactgctaatgagttgtctcgactagtaaattcaccgactgttagggagtatgtgaagtggggtatgggaaagattgtaacacccgctaagttgttgttgttaagagatgagaagcaagagttcgtagcgccaaaagtagtcaaggcgaaagctattgcctgctattgtgctgtgaagtggtttctcctctattgttttagttggataaagtttaatactgacaataaggttatatacaccacagaagtagcttcaaagcttactttcaagttgtgctgtttggcctttaagaatgccttacagacgtttaattggagcgttgtgtctaggggctttttcctagttgcaacggtctttttactctggtttaactttttgtatgctaatgttattttgagtgacttctatttgcctaatattgggcctctccctacgtttgtgggacagatagttgcgtggtttaagactacatttggtgtgtcaaccatctgtgatttctaccaggtgacggatttgggctatagaagttcgttttgtaatggaagtatggtatgtgaactatgcttctcaggttttgatatgctggacaactatgatgctataaatgttgttcaacacgttgtagataggcgtttgtcctttgactatattagcctatttaaactggtagttgagcttgtaatcggctactctctttatactgtgtgcttctacccactgtttgtccttattggaatgcagttattgaccacatggttgcctgaattctttatgctggagactatgcattggagtgctcgtttgtttgtgtttgttgccaatatgcttccagcttttacgttactgcgattttacatcgtggtgacagctatgtataaggtctattgtctttgtagacatgttatgtatggatgtagtaagcctggttgcttgttttgttataagagaaaccgtagtgtccgtgttaagtgtagcaccgttgttggtggttcactacgctattacgatgtaatggctaacggcggcacaggtttctgtacaaagcaccagtggaactgtcttaattgcaattcctggaaaccaggcaatacattcataactcatgaagcagcggcggacctctctaaggagttgaaacgccctgtgaatccaacagattctgcttattactcggtcacagaggttaagcaggttggttgttccatgcgtttgttctacgagagagatggacagcgtgtttatgatgatgttaatgctagtttgtttgtggacatgaatggtctgctgcattctaaagttaaaggtgtgcctgaaacgcatgttgtggttgttgagaatgaagctgataaagctggttttctcggcgccgcagtgttttatgcacaatcgctctacagacctatgttgatggtggaaaagaaattaataactaccgccaacactggtttgtctgttagtcgaactatgtttgacctttatgtagattcattgctgaacgtcctcgacgtggatcgcaagagtctaacaagttttgtaaatgctgcgcacaactctctaaaggagggtgttcagcttgaacaagttatggatacctttattggctgtgcccgacgtaagtgtgctatagattctgatgttgaaaccaagtctattaccaagtccgtcatgtcggcagtaaatgctggcgttgattttacggatgagagttgtaataacttggtgcctacctatgttaaaagtgacactatcgttgcagccgatttgggtgttcttattcagaataatgctaagcatgtacaggctaatgttgctaaagccgctaatgtggcttgcatttggtctgtggatgcttttaaccagctatctgctgacttacagcataggctgcgaaaagcatgttcaaaaactggcttgaagattaagcttacttataataagcaggaggcaaatgttcctattttaactacaccgttctctcttaaagggggcgctgtttttagtagaatgttacaatggttgtttgttgctaatttgatttgtttcattgtgttgtgggcccttatgccaacatatgcagtgcacaaatcggatatgcagttgcctttatatgccagttttaaagttatagataacggtgtgctaagggatgtgtctgttactgacgcatgcttcgcaaacaaatttaatcaattcgaccaatggtatgagtctacttttggtcttgcttattaccgcaactctaaggcttgtcctgttgtggttgctgtaatagatcaagacattggccataccttatttaatgttcctaccacagttttaagatatggatttcatgtgttgcattttataacccatgcatttgctactgatagcgtgcagtgttacacgccacatatgcaaatcccctatgataatttctatgctagtggttgcgtgttgtcatccctctgtactatgcttgcgcatgcagatggaaccccgcatccttattgttatacagggggtgttatgcataatgcctctctgtatagttctttggctcctcatgtccgttataacctggctagttcaaatggttatatacgttttcccgaagtggttagtgaaggcattgtgcgtgttgtgcgcactcgctctatgacctactgcagggttggtttatgtgaggaggccgaggagggtatctgctttaattttaatcgttcatgggtattgaacaacccgtattatagggccatgcctggaactttttgtggtaggaatgcttttgatttaatacatcaagttttaggaggattagtgcggcctattgatttctttgccttaacggcgagttcagtggctggtgctatccttgcaattattgtcgttttggctttctattatttaatcaagcttaagcgtgcctttggtgactacactagtgttgtggttatcaatgtaattgtgtggtgtataaattttctgatgctttttgtgtttcaggtttatcccacattgtcttgtttatatgcttgtttctacttctacaccacgctttatttcccttcggagataagtgttgttatgcatttgcaatggcttgtcatgtatggtgctattatgcccttgtggttttgcattatttacgtggcagtcgttgtttcaaaccatgcattgtggttgttctcttactgccgcaaaattggtaccgaggttcgtagtgacggcacatttgaggaaatggcccttactacctttatgattactaaagaatcttattgtaagttgaaaaactctgtttctgatgttgcttttaacaggtacttgagtctttacaacaagtaccgttacttcagtggcaaaatggatactgccgcttatagagaggctgcctgttcacaactggcaaaggcaatggaaacatttaaccataataatggtaatgatgttctctatcagcctccaaccgcctctgttactacatcatttttacagtctggtatagtgaagatggtgtcgcccacctctaaagtggagccttgtattgttagtgttacttatggtaacatgacacttaatgggttgtggttggatgataaagtttattgcccaagacatgttatctgttcttcagctgacatgacagaccctgattatcctaatttgctttgtagagtgacatcaagtgatttttgtgttatgtctggtcgtatgagccttactgtaatgtcttatcaaatgcagggctgccaacttgttttgactgttacactgcaaaatcctaacacgcctaagtattccttcggtgttgttaagcctggtgagacatttactgtactggctgcatacaatggcagacctcaaggagccttccatgttacgcttcgtagtagccataccataaagggctcctttctatgtggatcctgcggttctgtaggatatgttttaactggcgatagtgtacgatttgtttatatgcatcagctagagttgagtactggttgtcataccggtactgactttagtgggaacttttatggtccctatagagatgcgcaagttgtacaattgcctgttcaggattatacgcagactgttaatgttgtagcttggctttatgctgctatttttaacagatgcaactggtttgtgcaaagtgatagttgttccctggaggagtttaatgtttgggctatgaccaatggttttagctcaatcaaagccgatcttgtcttggatgcgcttgcttctatgacaggcgttacagttgaacaggtgttggccgctattaagaggctgcattctggattccagggcaaacaaattttaggtagttgtgtgcttgaagatgagctgacaccaagtgatgtttatcaacaactagctggtgtcaagctacagtcaaagcgcacaagagttataaaaggtacatgttgctggatattggcttcaacgtttttgttctgtagcattatctcagcatttgtaaaatggactatgtttatgtatgttactacccatatgttgggagtgacattgtgtgcactttgttttgtaagctttgctatgttgttgatcaagcataagcatttgtatttaactatgtacatcatgcctgtgttatgcacactgttttacaccaactatttggttgtgtacaaacagagttttagaggtctagcttatgcttggctttcacactttgtccctgctgtagattatacatatatggatgaagttttatatggtgttgtgttgctagtagctatggtgtttgttaccatgcgtagcataaaccacgacgtcttttctattatgttcttggttggtagacttgtcagcctggtatccatgtggtattttggagccaatttagaggaagaggtactattgttcctcacatccctatttggcacgtacacatggactactatgttgtcattggctaccgctaaggttattgctaaatggttggctgtgaatgtcttgtacttcacagacgtaccgcaaattaaattagttctgttgagctacttgtgtattggttatgtgtgttgttgttattggggaatcttgtcactccttaatagcatttttaggatgccattgggcgtctacaattataaaatctccgttcaggagttacgttatatgaatgctaatggcttgcgcccacctagaaatagttttgaggccctgatgcttaattttaagctgttgggaattggtggtgtgccagtcattgaagtatctcaaattcaatcaagattgacggatgttaaatgtgctaatgttgtgttgcttaattgcctccagcacttgcatattgcatctaattctaagttgtggcagtattgtagtactttgcacaatgaaatactggctacatctgatttgagcgtggccttcgataagttggctcaactcttagttgttttatttgctaatccagcagcagtggatagcaagtgccttgcaagtattgaagaagtgagcgatgattacgttcgcgacaatactgtcttgcaagccttacagagtgaatttgttaatatggctagcttcgttgagtatgaacttgctaagaagaatctagatgaggctaaggctagcggctctgccaatcaacagcagattaagcagctagagaaggcgtgtaatattgctaagtcagcatatgagcgcgacagagctgttgctcgtaagctggaacgtatggctgatttagctcttacaaacatgtataaagaagctagaattaatgataagaagagtaaggtagtgtctgcattgcaaaccatgctctttagtatggtgcgtaagctagataaccaagctcttaattctattttagacaacgcagttaagggttgtgtacctttgaatgcaataccatcattgacttcgaacactctgactataatagtgccagataagcaggtttttgatcaggttgtggataatgtgtatgtcacctatgctgggaatgtatggcatatacagtttattcaagatgctgatggtgctgttaaacaattgaatgagatagatgttaattcaacctggcctctagtcattgctgcaaataggcataatgaagtgtctactgttgttttgcagaacaatgagttgatgcctcagaagttgagaactcaggttgtcaatagtggctcagatatgaattgtaatactcctacccagtgttactataatactactggcacgggtaagattgtgtatgctatacttagtgactgtgacggcctgaagtacactaagatagtaaaagaagatggaaattgtgttgttttggaattggatcctccctgtaagttttctgttcaggatgtgaagggccttaaaattaagtacctttactttgtgaaggggtgtaatacactggctagaggctgggttgtaggcaccttatcctcgacagtgagattgcaggcgggtacggcaactgagtatgcctccaactctgcaatactgtcgctgtgtgcgttttctgtagatcctaagaaaacgtacttggattatataaaacagggtggagttcccgttactaattgtgttaagatgttatgtgaccatgctggcactggtatggccattactattaagccggaggcaaccactaatcaggattcttatggtggtgcttccgtttgtatatattgccgctcgcgtgttgaacatccagatgttgatggattgtgcaaattacgcggcaagtttgtccaagtgcccttaggcataaaagatcctgtgtcatatgtgttgacgcatgatgtttgtcaggtttgtggcttttggcgagatggtagctgttcctgtgtaggcacaggctcccagtttcagtcaaaagacacgaactttttaaacggattcggggtacaagtgtaaatgcccgtcttgtaccctgtgccagtggcttggacactgatgttcaattaagggcatttgacatttgtaatgctaatcgagctggcattggtttgtattataaagtgaattgctgccgcttccagcgtgtagatgaggacggcaacaagttggataagttctttgttgttaaaagaactaatttagaagtgtataacaaggagaaagaatgctatgagttgacaaaagaatgcggtgttgtggctgaacacgagttcttcacatttgatgtggagggaagtcgggtaccacacatagtccgtaaagatctttcaaagtttactatgttagatctttgctatgcattgcgtcattttgaccgcaatgattgttcaactcttaaggaaattctccttacatatgctgagtgtgaagagtcctacttccaaaagaaggactggtatgattttgttgagaatcctgatataattaatgtgtacaagaagcttggtcctatatttaatagagccctgcttaacactgccaagtttgcagacgcattagtggaggcaggcttagtaggtgttttaacacttgataatcaagatttatatggtcaatggtatgactttggagattttgtcaagacagtacctggttgtggtgttgccgtggcagactcttattattcatatatgatgccaatgctgactatgtgtcatgcgttggatagtgagttgtttgttaatggtacttatagggagtttgaccttgttcagtatgattttactgatttcaagctagagctgttcactaagtattttaagcattggagtatgacctaccacccgaacacctgtgagtgcgaggatgacaggtgcattattcattgcgccaattttaatatacttttcagcatggtcttacctaagacctgttttgggcctcttgttaggcagatatttgtggatggtgttcctttcgttgtgtcgatcggttaccattataaagaattaggtgttgttatgaatatggatgtggatacacatcgttatcgcttgtctcttaaggacttgcttttgtatgctgcagaccctgcccttcatgtggcgtctgctagtgcactgcttgatttgcgcacatgttgttttagcgttgcagctattacaagtggcgtaaaatttcaaacagttaaacctggaaattttaatcaggatttctacgagtttattttgagtaaaggcctgcttaaagaggggagctccgttgatttgaagcacttcttctttacgcaggatggtaatgctgctattactgattacaattactacaagtataatctacccaccatggtggatattaagcagttgttgtttgttttagaagttgttaataagtacttcgagatctatgagggtgggtgtatacccgcaacacaggtcattgttaataattatgacaagagtgctggctatccatttaataaatttggaaaggccaggctctattatgaggcattatcatttgaggagcaggatgaaatttatgcgtataccaaacgcaatgtcctgccgaccctaactcaaatgaatcttaaatatgctattagtgctaagaatagggcccgcaccgttgctggtgtctctattctcagtactatgactggcagaatgtttcatcaaaagtgtctaaagagtatagcagctactcgcggtgttcctgtagttataggcaccacgaagttctatggcggttgggatgatatgttacgccgccttattaaagatgttgatagtcctgtactcatgggttgggactatcctaaatgtgatcgtgctatgccaaacatactgcgtattgttagtagtttggtgctagcccgtaaacatgattcgtgctgttcgcatacggatagattctatcgtcttgcgaacgagtgcgcccaagttttgagtgaaattgttatgtgtggtggttgttattatgttaaaccaggtggcactagtagtggggatgcaaccactgcttttgctaattctgtgtttaacatttgtcaagctgtttccgccaatgtatgctcgcttatggcatgcaatggacacaaaattgaagatttgagtatacgcgagttacaaaagcgcctatactctaatgtctatcgtgcggaccatgttgaccccgcatttgttagtgagtattatgagtttttaaacaagcattttagtatgatgattttgagtgatgatggtgttgtgtgttataattcagagtttgcgtccaagggttatattgctaatataagtgcctttcaacaggtattatattatcaaaacaacgtgtttatgtctgaggccaaatgttgggtagaaacagacatcgaaaagggaccgcatgaattttgttctcaacatacaatgctagtcaagatggatggtgatgaagtctaccttccataccctgatccttcgagaatcttaggagcaggctgttttgttgatgatttactcaagactgatagcgttctcttgatagagcgtttcgtaagtcttgcaattgatgcttatcctttagtataccatgagaacccagagtatcaaaatgtgttccgggtatatttagaatacatcaagaagctgtacaatgatctcggtaatcagatcctggacagctacagtgttattttaagtacttgtgatggtcaaaagtttactgacgagacgttttacaagaacatgtatttaagaagtgcagtgctgcaaagcgttggtgcctgcgttgtctgtagttctcaaacatcattacgttgtggcagttgcatacgcaagcctttgctgtgttgcaaatgcgcctatgatcatgttatgtccactgatcataaatatgtcctgagtgtgtcaccatatgtgtgtaattcaccgggatgtgatgtaaatgatgttaccaaattgtatttaggtggtatgtcatattattgtgaggaccataaaccacagtattcattcaaattggtgatgaatggtatggtttttggtttatataagcagtcttgtactggttcgccctacatagaggattttaataaaatcgctagttgcaaatggacagaagtcgatgattatgtgctagctaatgaatgcaccgaacgccttaaattgtttgccgcagaaacgcagaaggccacagaagaggcctttaagcaatgttatgcgtcagcaacgatccgtgagatcgtgagcgatcgggagttaattttatcttgggaaattggtaaagtccgcccgccacttaataaaaattacgtgttcaccggctaccattttactaataatggtaagacagttttaggtgagtatgtttttgataagagtgagttgactaatggtgtgtattatcgcgccacaaccacttataagttatctgtaggtgatgtgttcattttaacatcacacgcagtgtctagtttaagtgctcctacattagtaccgcaggagaattatactagcattcgttttgctagtgtttatagtgtgcctgagacgtttcagaataatgtgcctaattatcagcacattggaatgaagcgctattgtactgtacagggaccgcctggtactggtaagtcccatctagccattgggctagctgtttattattgtacagcgcgcgtggtgtataccgctgctagccatgctgcagttgacgcgctgtgtgaaaaggcacataaatttctcaacatcaacgactgcacgcgtattgttcctgcaaaggtgcgtgtagattgttatgataaattcaaggtcaatgacaccactcgcaagtatgtgtttactacaataaatgcattacctgagttggtgactgacattattgtcgttgatgaagttagtatgcttaccaactatgagctgtctgttattaacagtcgtgttagggctaagcattatgtgtatattggcgacccggcgcagttacctgcaccacgtgtgctactgaataagggaactctagaacctagatattttaattccgttaccaagctaatgtgttgtttgggtccagatattttcttgggcacctgttatagatgccctaaggagattgtggatacggtgtcagccttggtttataataataagctgaaggctaaaaatgataatagctccatgtgctttaaggtttattataagggccagactacacatgagagttctagtgctgttaatatgcagcaaatacatttaatttccaagtttctgaaggcaaaccccagttggagtaacgccgtatttattagtccttataactcgcagaactatgttgctaagagagtcttgggattacaaacccagacagtagactcagcgcagggttctgaatatgattttgttatctactcacagactgcggaaacagcgcattctgtcaatgtaaatagattcaatgttgctattacacgtgctaagaagggtattctctgtgtcatgagtagtatgcaattatttgagtctcttaattttactacactgacgttggataagattaacaatccacgattacagtgtactacaaatttgtttaaggattgtagcaggagctatgtaggatatcacccagcccatgcaccatcctttttggcagttgatgacaaatataaggtaggcggtgatttagccgtttgccttaatgttgctgattctgctgtcacttattcgcggcttatatcactcatgggattcaagcttgacttgacccttgatggttattgtaagctgtttataactagagatgaagctatcaaacgtgttagagcctgggttggcttcgatgcagaaggtgcccatgcgatacgtgatagcattgggacaaatttcccattacaattaggcttttcgactggaattgattttgttgtcgaagccactggaatgtttgctgagagagatggttatgtctttaaaaaggcagccgcacgagctcctcctggcgaacaatttaaacaccttatcccacttatgtcaagagggcagaaatgggatgtggttcgcattagaatagtacaaatgttgtcagaccacctagtggatttggcagacagtgttgtacttgtgacgtgggctgccagctttgagctcacatgtttgcgatatttcgctaaagttggaagagaagttgtgtgtagtgtctgcaccaagcgtgcgacatgttttaattctagaactggatactatggatgctggcgacatagttattcctgtgattacctgtacaacccactaatagttgacattcaacagtggggatatacaggatctttaactagcaatcatgatcctatttgcagcgtgcataagggtgctcatgttgcatcatctgatgctatcatgacccggtgtctagctgttcatgattgcttttgtaagtctgttaattggaatttagaataccccattatttcaaatgaggtcagtgttaatacctcctgcaggttattgcagcgcgtaatgtttagggctgcgatgctatgcaataggtatgatgtgtgttatgacattggcaaccctaaaggtcttgcctgtgtcaaaggatatgattttaagttctatgacgcctcccctgttgttaagtctgttaaacagtttgtttacaaatacgaggcacataaagatcaatttttagatggtttgtgtatgttttggaactgcaatgtggataagtatccagcgaatgcagttgtgtgtaggtttgacacgcgtgtgttgaacaaattaaatctccctggctgtaatggtggcagtttgtatgttaacaaacatgcattccacaccagtccctttacccgggctgccttcgagaatttgaagcctatgcctttcttttattattcagatacgccctgtgtgtatatggaaggcatggaatctaagcaggtcgattatgtcccattgagaagcgctacatgcatcacaagatgcaatttaggtggcgctgtttgtttaaaacatgctgaggagtatcgtgagtaccttgagtcttacaatacggcaaccacagcgggttttactttttgggtctataagacttttgatttttacaacctttggaatacttttactaggctccaaagtttagaaaatgtagtgtataacctggtcaacgctggacactttgatggccgggcgggtgaactgccttgtgctgttataggtgagaaagtcattgccaagattcaaaatgaggatgtcgtggtctttaaaaataacacgccattccccactaatgtggctgtcgaattatttgctaagcgcagtattcggccccaccccgagcttaagctctttagaaatttgaatattgacgtgtgctggagtcacgtcctttgggattatgctaaggatagtgtgttttgcagttcgacgtataaggtctgcaaatacacagatttacagtgcattgaaagcttgaatgtactttttgatggtcgtgataatggtgctcttgaagcttttaagaagtgccggaatggcgtctacattaacacgacaaaaattaaaagtctgtcgatgattaaaggcccacaacgtgccgatttgaatggcgtagttgtggagaaagttggagattctgatgtggaattttggtttgctgtgcgtaaagacggtgacgatgttatcttcagccgtacagggagccttgaaccgagccattaccggagcccacaaggtaatccgggtggtaatcgcgtgggtgatctcagcggtaatgaagctctagcgcgtggcactatctttactcaaagcagattattatcttctttcacacctcgatcagagatggagaaagattttatggatttagatgatgatgtgttcattgcaaaatatagtttacaggactacgcgtttgaacacgttgtttatggtagttttaaccagaagattattggaggtttgcatttgcttattggcttagcccgtaggcagcaaaaatccaatctggtaattcaagagttcgtgacatacgactctagcattcattcgtactttatcactgacgagaacagtggtagtagtaagagtgtgtgcactgttattgatttattgttagatgattttgtggacattgtaaagtccctgaatctaaagtgtgtgagtaaggttgttaatgttaatgtggattttaaggacttccagtttatgttgtggtgcaatgaggagaaggtcatgactttctatcctcgtttgcaggctgctgctgactggaaacctggttatgttatgcctgtcttatataagtatttggaatcgcctctggaaagagtaaacctctggaattatggcaagccgattactttacctacaggatgtatgatgaatgttgctaagtatactcaattatgtcaatatttgagcactacaacattagcagttccggctaatatgcgtgtcttacaccttggtgccggttcggataagggtgttgcccctgggtctgcagttcttaggcagtggctaccagcgggaagtattcttgtagataatgatgtgaatccatttgtgagtgacagtgtcgcctcatattatggaaattgtataaccttaccctttgattgtcagtgggatctgataatttctgatatgtacgaccctcttactaagaacattggggagtacaacgtgagtaaagatggattctttacttacctctgtcatttaattcgtgacaagttggctctgggtggcagtgttgccataaaaataacagagttttcttggaacgctgagttatatagtttaatggggaagtttgcgttctggacaatcttttgcaccaacgtaaacgcctcttcaagtgaaggatttttgattggcataaattggttgaataagacccgtaccgaaattgacggtaaaaccatgcatgccaattatctgttttggagaaatagtacaatgtggaatggaggggcttacagtctctttgacatgagtaagttccctttgaaagcggctggtacggctgttgttagccttaaaccagaccaaataaatgacttagtcctctccttgattgagaagggcaagttattagtgcgtgatacacgcaaagaagtttttgttggcgatagcctagtaaatgtcaaataaatctatacttgtcgtggctgtgaaaatggcctttgctgacaagcctaatcatttcataaactttcccctggcccaatttagtggctttatgggtaagtatttaaagctacagtctcaacttgtggaaatgggtttagactgtaaattacagaaggcaccacatgttagtattaccctgcttgatattaaagcagaccaatacaaacaggtggaatttgcaatacaagaaataatagatgatctggcggcatatgagggagatattgtctttgacaaccctcacatgcttggcagatgccttgttcttgatgttagaggatttgaagagttgcatgaagatattgttgaaattctccgcagaaggggttgcacggcagatcaatccagacactggattccgcactgcactgtggcccaatttgacgaagaaagagaaacaaaaggaatgcaattctatcataaagaacccttctacctcaagcataacaacctattaacggatgctgggcttgagctcgtgaagataggttcttccaaaatagatgggttttattgtagtgaactgagtgtttggtgtggtgagaggctttgttataagcctccaacacccaaattcagtgatatatttggctattgctgcatagataaaatacgtggtgatttagaaataggcgacctgccgcaggatgatgaggaagcgtgggccgagctaagttaccactatcaaagaaacacctacttcttcagacatgtgcacgataatagcatctattttcgtaccgtgtgtagaatgaagggttgtatgtgttgatttgtttttacactattagtgtaataagcttattattttgttgaaaagggcaggatgtgcatagctatggctcctcgcacactgcttttgctgatttgatgtcagctggtgtttgggttcaatgaacctcttaacatcgtttcacatttaaatgatgactggtttctatttggtgacagtcggtccgactgtacctatgtagaaaataacggtcatcctaaattagattggcttgacctcgacccaaagttgtgtaattcaggaaagatttccgcaaagagtggtaactctctctttaggagttttcacttcactgatttttacaattatacgggtgagggataccaaattgtattttatgaaggagttaattttagtcccagccatggctttaaatgcctggctcatggagataataaaagatggatgggcaataaagctcgattttatgcccgagtgtatgagaagatggcccaatataggagcctatcgtttgttaatgtgtcttatgcctatggaggtaatgcaaagcccgcctccatttgcaaagacaatactttaacactcaataaccccaccttcatatcgaaggagtctaattatgttgattactactacgagagtgaggctaatttcacactagaaggttgtgatgaatttatagtaccgctctgtggttttaatggccattccaagggctcgtcgtcggatgctgccaataaatattatactgactctcagagttactataatatggatattggtgtcttatatgggttcaattcgaccttggatgttggcaacactgctaaggatccgggtcttgatctcacttgtaggtatcttgcattgactcctggtaattataaggctgtgtccttagaatatttgttaagcttaccctcaaaggctatttgcctccataagacaaagcgctttatgcctgtgcaggtagttgactcaaggtggagtagcatccgccagtcagacaatatgaccgctgcagcctgtcagctgccatattgtttctttcgcaacacatctgcgaattatagtggtggcacacatgatgcgcaccatggtgattttcatttcaggcagttattgtctggtttgttatataatgtttcctgtattgcccagcagggtgcatttctttataataatgtgtcgtcctcttggccagcctatgggtacggtcattgtccaacggcagctaacattggttatatggcacctgtttgtatctatgaccctctcccggtcatactgctaggtgtgttattgggtatagctgtgttgactattgtgtttctgatgttttattttatgacggatagcggtgttagattgcatgaggcataatctaaacatgtttgtttttcttgttttattgccactagtctctagtcagtgtgttaatcttacaaccagaactcaattaccccctgcatacactaattctttcacacgtggtgtttattaccctgacaaagttttcagatcctcagttttacattcaactcaggacttgttcttacctttcttttccaatgttacttggttccatgctatacatgtctctgggaccaatggtactaagaggtttgataaccctgtcctaccatttaatgatggtgtttactttgcttccactgagaagtctaacataataagaggctggatttttggtactactttagattcgaaaacccagtccctacttattgttaataacgctactaatgttgttatcaaagtctgtgaatttcaattttgtaacgatccatttttgggtgtttattaccacaaaaacaacaaaagttggatggaaagtgagttcagagtttattctagtgcgaataattgcacttttgaatacgtctctcagccttttcttatggaccttgaaggaaaacagggtaatttcaaaaatcttagggaatttgtgttcaagaatattgatggttacttcaagatatactctaagcacacgcctattaatttagtgcgtgatctccctcagggtttttcggctttagaaccattggtagatttgccaataggtattaacatcactaggtttcaaactttacttgctttacatagaagttatttaactcctggtgattcttcttcaggttggacagctggtgctgcagcttattatgtgggttatcttcaacctaggacttttctactgaagtacaatgaaaatggaaccattacagatgctgtagactgtgcacttgaccctctctcagaaacaaagtgtacgttgaaatccttcactgtagaaaaaggaatctatcaaacttctaactttagagtccaaccaacagaatctattgttagatttcctaacatcacaaacttgtgcccttttggtgaagtttttaacgccaccagatttgcatctgtttatgcttggaacaggaagagaatcagcaactgtgttgctgattattctgtcctgtataattccgcatcattttccacttttaagtgttatggagtgtctcctactaaattaaatgatctctgctttactaatgtctatgcagattcatttgtaattagaggtgatgaagtcagacaaatcgctccagggcaaactggaaagattgctgattataactacaaattaccagatgattttacaggctgcgttatagcttggaattctaacaatcttgattctaaggttggtggtaattataattacctgtacagattgtttaggaagtctaatctcaaaccttttgagagagatatttcaactgaaatctatcaggccggtagcacaccttgtaatggtgttgaaggttttaattgttactttcctctgcaatcatatggtttccaacccactaatggtgttggttaccaaccatacagagtagtagtactttcttttgaacttctacatgcaccagcaactgtttgtggacctaaaaagtctactaatttggttaagaacaagtgtgtcaatttcaacttcaatggtttaacaggcacaggtgttcttactgagtctaacaaaaagtttctgcctttccaacaatttggcagagacattgctgacactactgatgctgttcgtgatccacaaacacttgagattcttgacattacaccatgttcttttggtggtgtcagtgttataacaccaggaacaaatacttctaaccaggttgctgttctttatcaggatgttaactgcacagaagtccctgttgctattcatgcagatcaacttactcctacttggcgtgtttattctacaggttctaatgtttttcaaacacgtgcaggctgtttaataggggctgaacatgtcaacaactcatatgagtgtgacatacccattggtgcaggtatatgcgctagttatcagactcagactaattctcctcggagagcaagaagtgtagctagtcaatccatcattgcctacactatgtcacttggtgcagaaaattcagttgcttactctaataactctattgccatacccacaaattttactattagcgttaccacagaaattctaccagtgtctatgaccaagacatcagtagattgtacaatgtacatttgtggtgattcaactgaatgcagcaatcttttgttgcaatatggcagtttttgtacacaattaaaccgtgctttaactggaatagctgttgaacaagacaaaaacacccaagaagtttttgcacaagtcaaacaaatttacaagacaccaccaattaaagattttggcggttttaattttagccagatactgccagatccatcaaaaccaagcaagaggtcatttattgaagatctactgttcaacaaagtgacacttgcagatgctggcttcatcaaacaatatggtgattgccttggtgatattgctgctagagacctcatttgtgcacaaaagtttaacggccttactgttttgccacctttgctcacagatgaaatgattgctcaatacacttctgcactgttagcaggtacaatcacttctggttggacttttggtgcaggtgctgcattacaaataccatttgctatgcaaatggcttataggtttaatggtattggagttacacagaatgttctctatgagaaccaaaaattgattgccaaccaatttaatagtgctattggcaaaattcaagactcactttcttccacagcaagtgcacttggaaaacttcaagatgtggtcaaccaaaatgcacaagctttaaacacgcttgttaaacaacttagctccaattttggtgcaatttcaagtgttttaaacgacatcctttcacgtcttgacaaagttgaggctgaagtgcaaattgataggttgatcacaggcagacttcaaagtttgcagacatatgtgactcaacaattaattagagctgcagaaatcagagcttctgctaatcttgctgctactaaaatgtcagagtgtgtacttggacaatcaaaaagagttgacttttgcggaaagggctatcatcttatgtcatttcctcagtcagcacctcatggtgtcgtctttttgcatgtgacttatgtccctgcacaagaaaagaacttcacaactgctcctgccatttgtcatgatggaaaagcacactttcctcgtgaaggtgtctttgtttcaaatggcacacactggtttgtaacacaaaggaatttttatgaaccacaaatcattactacagacaacacatttgtgtctggtaactgtgatgttgtaataggaattgtcaacaacacagtttatgatcctttgcaacctgaattagactcattcaaggaggagcttgataaatacttcaagaaccatacctcaccagatgttgatttaggtgacatctctggcattaatgcttcagttgtaaacattcagaaagaaatcgaccgcctcaatgaggttgccaagaatttaaatgaatctctcatcgatctccaagaacttggaaagtatgagcagtatataaaatggccatggtacatttggctaggttttatagctggcttgattgccatagtaatggtgacaattatgctttgctgtatgaccagttgctgtagttgtctcaagggctgttgttcttgtggatcctgctgcaaatttgacgaggacgactctgagccagtgctcaaaggagtcaaattacattacacataactatcacagcctctcctggaaagacagaaaatctaaacaatttatagcattctcattgctacctggccccgtaagaggcagtcatagctatggccgtgttggtcctaaggctacattggctgctgtctttattggtccatttattgtagcatgtatgctaggcattggcctagtttatttattgcaattgcaagttcaaatttttcatgttaaggataccatacgtgtgactggcaagccagccactgtgtcttatactacaagtacaccagtaacaccgagcgcgacgacgctcgatggtactacgtatactttaattagacccactagctcttatacaagagtttatcttggtactccaagaggttttgattatagtacatttgggcctaagaccctagattatgttactaatctaaacctcatcttaattctggtcgtccatatacttttaaggcattgtccaggcatatgaggccaacagccacatggatttggcatgtgagtgatgcatggttacgccgcacgcgggactttggtgtcattcgcctagaagatttttgttttcaatttaattatagccaaccccgagttggttattgtagagttcctttaaaggcttggtgtagcaaccagggtaaatttgcagcgcagtttaccctaaaaagttgcgaaaaaccaggtcacgaaaaatttattactagcttcacggcctacggcagaactgtccaacaggccgttagcaagttagtagaagaagctgttgattttattctttttagggccacgcagctcgaaagaaatgtttaatttattccttacagacacagtatggtatgtggggcagattatttttatattcgcagtgtgtttgatggtcaccataattgtggttgccttccttgcgtctatcaaactttgtattcaactttgcggtttatgtaatactttggtgctgtccccttctatttatttgtatgataggagtaagcagctttataagtactataatgaagaaatgagactgcccctattagaggtggatgatatctaatccaaacattatgagtagtactactcaggccccagagcccgtctatcaatggaccgccgacgaggcagttcaattccttaaggaatggaacttctcgttgggcattatactactctttattactatcatactacagttcggttacacgagccgtagcatgtttatttatgttgtgaaaatgataatcttgtggttaatgtggccactgactattgttttgtgtattttcaattgcgtgtatgcgctaaataatgtgtatcttggattttctatagtgtttactatagtgtccattgtaatctggatcatgtattttgtgaacagcataaggttgtttatcaggactggtagctggtggagcttcaaccccgaaacaaacaaccttatgtgtatagatatgaaaggtaccgtgtatgttagacccattattgaggattaccatacactaacagccactattattcgtggccacctctacatgcaaggtgttaagctaggcaccggtttctctttgtctgacttgcccgcttatgttacagttgctaaggtgtcacacctttgcacttataagcgcgcattcttagacaaggtagacggtgttagcggttttgctgtttatgtgaagtccaaggtcggaaattaccgactgccctcaaacaaaccgagtggcgcggacaccgcattgttgagaacctaatctaaactttaaggagagaatgaatcctatgtcggcgctcggtggtaacccctcgcgagaaagtcgggataggacactctctatcagaatggatgtcttgctgtcataacagatagagaaggttgtggcagaccctgtatcaattagttgaaagagattgcaaaatagagaatgtgtgagagaagttagcaaggtcctacgtctaaccataagaacggcgataggcgccccctgggaacagctcacatcagggtactattcctgcaatgccctagtaaatgaatgaagttgatcatggccaattggaagaatcacaaaaaaaaaaaaaaaaacggccggtttaaacgctacagtccaagttccaagcgggatactagatgtataatgtccgccatgcagacgaaaccagtcggagattaccgagcattctatcacgtcggcgaccaatagtgagcttagggataacagggtaataaacgatccccgggaattcactggccgtcgttttacaacgtcgtgactgggaaaaccctggcgttacccaacttaatcgccttgcagcacatccccctttcgccagctggcgtaatagcgaagaggcccgcaccgatcgcccttcccaacagttgcgcagcctgaatggcgaatggcgatagatccggtggatgaccttttgaatgacctttaatagattatattactaattaattggggaccctagaggtccccttttttattttaaaaattttttcacaaaacggtttacaagcataaagctcggacggatcttttccgctgcataaccctgcttcggggtcattatagcgattttttcggtatatccatcctttttcgcacgatatacaggattttgccaaagggttcgtgtagactttccttggtgtatccaacggcgtcagccgggcaggataggtgaagtaggcccacccgcgagcgggtgttccttcttcactgtcccttattcgcacctggcggtgctcaacgggaatcctgctctgcgaggctggccggctaccgccggcgtaacagatgagggcaagcggatggctgatgaaaccaagccaaccaggaagggcagcccacctatcaaggtgtcgatgcaggggggggggaaagccacgttgtgtctcaaaatctctgatgttacattgcacaagataaaaatatatcatcatgaacaataaaactgtctgcttacataaacagtaatacaaggggtgttatgagccatattcaacgggaaacgtcttgctcaaggccgcgattaaattccaacatggatgctgatttatatgggtataaatgggctcgcgataatgtcgggcaatcaggtgcgacaatctatcgattgtatgggaagcccgatgcgccagagttgtttctgaaacatggcaaaggtagcgttgccaatgatgttacagatgagatggtcagactaaactggctgacggaatttatgcctcttccgaccatcaagcattttatccgtactcctgatgatgcatggttactcaccactgcgatccccggaaaaacagcattccaggtattagaagaatatcctgattcaggtgaaaatattgttgatgcgctggcagtgttcctgcgccggttgcattcgattcctgtttgtaattgtccttttaacagcgatcgcgtatttcgtctcgctcaggcgcaatcacgaatgaataacggtttggttgatgcgagtgattttgatgacgagcgtaatggctggcctgttgaacaagtctggaaagaaatgcataagtttttgccattctcaccggattcagtcgtcactcatggtgatttctcacttgataaccttatttttgacgaggggaaattaataggttgtattgatgttggacgagtcggaatcgcagaccgataccaggatcttgccatcctatggaactgcctcggtgagttttctccttcattacagaaacggctttttcaaaaatatggtattgataatcctgatatgaataaattgcagtttcatttgatgctcgatgagtttttctaatcagaattggttaattggttgtaacactggcagagcattacgctgacttgacgggacggcggctttgttgaataaatcgaacttttgctgagttgaaggatcagatcacgcatcttcccgacaacgcagaccgttccgtggcaaagcaaaagttcaaaatcaccaactggtccacctacaacaaagctctcatcaaccgtggctccctcactttctggctggatgatggggcgattcaggcctggtatgagtcagcaacaccttcttcacgaggcagacctcagacggtatcggatcgatcccccgatgtgtagcagtggcggaccatataggcagatcagaaggcgcggttctcctacatgagcttttcaattcaattcatcattttttttttattcttttttttgatttcggtttccttgaaatttttttgattcggtaatctccgaacagaaggaagaacgaaggaaggagcacagacttagattggtatatatacgcatatgtagtgttgaagaaacatgaaattgcccagtattcttaacccaactgcacagaacaaaaacctgcaggaaacgaagataaatcatgtcgaaagctacatataaggaacgtgctgctactcatcctagtcctgttgctgccaagctatttaatatcatgcacgaaaagcaaacaaacttgtgtgcttcattggatgttcgtaccaccaaggaattactggagttagttgaagcattaggtcccaaaatttgtttactaaaaacacatgtggatatcttgactgatttttccatggagggcacagttaagccgctaaaggcattatccgccaagtacaattttttactcttcgaagacagaaaatttgctgacattggtaatacagtcaaattgcagtactctgcgggtgtatacagaatagcagaatgggcagacattacgaatgcacacggtgtggtgggcccaggtattgttagcggtttgaagcaggcggcagaagaagtaacaaaggaacctagaggccttttgatgttagcagaattgtcatgcaagggctccctatctactggagaatatactaagggtactgttgacattgcgaagagcgacaaagattttgttatcggctttattgctcaaagagacatgggtggaagagatgaaggttacgattggttgattatgacacccggtgtgggtttagatgacaagggagacgcattgggtcaacagtatagaaccgtggatgatgtggtctctacaggatctgacattattattgttggaagaggactatttgcaaagggaagggatgctaaggtagagggtgaacgttacagaaaagcaggctgggaagcatatttgagaagatgcggccagcaaaactaaaaaactgtattataagtaaatgcatgtatactaaactcacaaattagagcttcaatttaattatatcagttattacccgggaatctcggtcgtaatgatttttataatgacgaaaaaaaaaaaattggaaagaaaaagctgggcgcgccggccggcccttttcatcacgtgctataaaaataattataatttaaattttttaatataaatatataaattaaaaatagaaagtaaaaaaagaaattaaagaaaaaatagtttttgttttccgaagatgtaaaagactctagggggatcgccaacaaatactaccttttatcttgctcttcctgctctcaggtattaatgccgaattgtttcatcttgtctgtgtagaagaccacacacgaaaatcctgtgattttacattttacttatcgttaatcgaatgtatatctatttaatctgcttttcttgtctaataaatatatatgtaaagtacgctttttgttgaaattttttaaacctttgtttatttttttttttcttcattccgtaactcttctaccttctttatttactttctaaaatccaaatacaaaacataaaaataaataaacacagagtaaattcccaaattattccatcattaaaagatacgaggcgcgtgtaagttacaggcaagcgatcggccggcccgggcatttaaatgcaggccgcgtacgcgtcgacggtaccgaattcgcttaaacgagctcatgttcgccggtgaacgcgttgaggaagccgggcagtgcctcggcaaaatccttgcgtgtagacaagacatctgcgtagcagttgtcctcaacaacgatgtcgaaatccaaatcggagtgctcatcgagtcctccgtgaacgtaagagccgccgatcagaagagcgcggaagcgaacatcggaagcgaccgcatcgcggatgcggttcaagaaagttgcatgagcttgtggaagtgtgctgagcataaatgattctcctagctgttctttgggtaagtacgccatcaggacgttgtgagtggcgcgatttttagcggctgaaatcagcccttgagcctgtcggcaagtcgcgtcatgaggtccatgcgctcatgcaggatcgccacgaccaacgcgggttcgcccgcacgcggcaggcaaaaaacgtagtggtgttcgcagcgggccatccgcagcgcgggaaagagttcgctcatgtccttaaacgggccttcgccggcggcaagcctggctatgccctgttccagcttagcgatatagcggcgcacctgcgccgcgccccactcccggcgcgtgtagcggatgatgccgcgtagatcggcttcggcctcagccgtgaggatgtaggccgtcaagcgcgatccccgctgagttcttcatcaagaatttcgccgacgctcttggtggacaccttgccggcaagcccatcgttgatgcggttccccagcatggttttcagttcctgccatgcctgatcggcatcagcgtcaccggggaacagacgttcgagggcgtattgcttaatggtcttgccctgcaaggcggccagggctttcaggctctggtgctgctggtccgtcatgtcgattgtcaggcggctcattggataacctccataaaatacacgtaaccacattagcacatatgtgggcgtgaggctacagcgcgaggcgcattaaggtcgggaaaatgcgctaggcgcatttaaattgcgtattgctgtaatgcgccatgccggctagactaggcccaaatgggtatacccaatttgaccaagggggacgcgatgagggcggccaagcactaccgacaacttctatccatcgacttcaacatcgaggcgctggccttcgtgcctggacccgacggcacacgcggccggcgcatccacgtcctggggcgcgaggtccgcgaccggcccggcctggtcgagtacctttcgccggcgttcggctcgcgggtggcgctggacggctactgcaaggccaatttcgatgcagtgctgcacctggcgtaccccgatcatcagcaatggggccacgcatgaagcgccgaagctacgccatgctgcgcgccgctgccgcgctggccgtcctggtcgttgcctcgccggcatgggccgagctgcgcggcgaggtcgtgcgcatcatcgacggcgacaccatcgacgtgctggtagacaagcagccggtgcgcgtgcgcctggtggacattgacgcgccggaaaagcggcaagccttcggcgaacgtgcgcgccaggcgctggccggcatggtgttccgccggcacgtcctggtcgacgagaaggacaccgaccgttacggccgcacgctgggcaccgtgtgggtcaacatggagctggccagccggccgccgcagccgcgcaacgtcaacgccgcgatggttcaccagggcatggcgtgggcctatcgcttccacggccgcgcggccgaccctgaaatgctgcggctcgaacaggaggcgcgaggcaagcgcgtcggcctctggtccgatccgcacgccgtcgagccgtggaaatggcgacgcgagagcaacaaccggagggacgaaggttgaaggtcgcccgcatctacctgcgcgccagtacggacgagcagaatcttgaacgccaggagagccttgtagcggccacgcgggccgccgggtactacgtcgccggcatctaccgcgagaaggcgtccggcgcacgcgccgaccggcccgagctgctgcgcatgatcgcggacctgcaacctggtgaagtcgtcgttgcggagaagatcgaccgcatcagccgcttgccgttggccgaggccgagcgcctggttgcgtcgatccgggccaaaggggccaagctggccgtgcctggcgtggtggacctgtcggagctggccgccgaggcgaacggagtggcgaaaatcgttctggaatccgtccaggacatgcttttgaagctcgccttgcagatggcccgcgacgactacgaggatcggcgcgagcgtcaacgtcagggtgtccagttggcgaaggccgccggccgctacaccggccgcaaacgtgacgccggcatgcacgaccgcatcatcacgcttcgctccggcggatcgagcattgccaagacggccaagctggtcggatgcagcccgagccaggtcaaacgagtgtgggcggcctggaacgcgcagcagcaaaaataaagccgggcagtgcccggcttttctcaccttttcgcgtcccgcagggccgctgcgagcgccctacctagatcctcgctttccccctcggtgtagtccggccagggcacgaagggcgcggatgcgaacctgttgagcaggtacgccttcgggcagcggtagaccaccggcgagttcgccttttcatcccaccgggccaggatcacgtccgcatcacagtgcatgtccttcacctggtcgcggaagaagccgaaggccaccatgccgctatgttcgccgaggaacgccagttgcttcgcgctggcgatcgcgccgacgccgccggccaaaaccgacgccatcacccagccgacgaaccagaagctggcatgcttgcggttgaccaccgcacgcgcagccgcgaccaggacaacggccaagctgccgaccagggccatgacgaccgtgatccggccgttgtggaaagcgatgggcttgccagcgtccgcttgcacggcgtcgtaaatgctggacccgatgggcgcgcacatcagcacgacaggcagcagcaccaggaacatcgtccgcgtccattgcgcgagtgccttgcggcgttcgccggcggcaagcgcctccatcatcggcgtgaagcccaacagggccaccgcagccgccaagccggcaacgatgccgcaggcgattacatacatacatcctccctaatgcgccttgcgcacggttgtagtcagagtccgcggtggggcgataagctcatgaccaaaatcccttaacgtgagttttcgttccactgagcgtcagaccccgtagaaaagatcaaaggatcttcttgagatcctttttttctgcgggggatcaggaccgctgccggagcgcaacccactcactacagcagagccatgtagacaacatcccctccccctttccaccgcgtcagacgcccgtagcagcccgctacgggctttttcatgccctgccctagcgtccaagcctcacggccgcgctcggcctctctggcggccttctggcgctcctgctgcggcgtccgctcgtgggccgtggcgcgggtccgcgcgccggcctcgtgcgcctggcgctcgcgggcgaggtccagggcggccgtcttcacgttctgccttgcgcagatgagatagatcgatctagcgtggactcaaggctctcgcgaatggctcgcgttggaaactttcattgacacttgaggggcaccgcagggaaattctcgtccttgcgagaaccggctatgtcgtgctgcgcatcgagcctgcgcccttggcttgtctcgcccctctccgcgtcgctacggggcttccagcgcctttccgacgctcaccgggctggttgccctcgccgctgggctggcggccgtctatggccctgcaaacgcgccagaaacgccgtcgaagccgtgtgcgagacaccgcggccgccggcgttgtggatacctcgcggaaaacttggccctcactgacagatgaggggcggacgttgacacttgaggggccgactcacccggcgcggcgttgacagatgaggggcaggctcgatttcggccggcgacgtggagctggccagcctcgcaaatcggcgaaaacgcctgattttacgcgagtttcccacagatgatgtggacaagcctggggataagtgccctgcggtattgacacttgaggggcgcgactactgacagatgaggggcgcgatccttgacacttgaggggcagagtgctgacagatgaggggcgcacctattgacatttgaggggctgtccacaggcagaaaatccagcatttgcaagggtttccgcccgtttttcggccaccgctaacctgtcttttaacctgcttttaaaccaatatttataaaccttgtttttaaccagggctgcgccctgtgcgcgtgaccgcgcacgccgaaggggggtgcccccccttctcgaaccctcccggcccgctaacgcgggcctcccatccccccaggggctgcgcccctcggccgcgaacggcctcaccccaaaaatggcagcgctggcagtccttgccattgccgggatcggggcagtaacgggatgggcgatcagcccgagcgcgacgcccggaagcattgacgtgccgcaggtgctggcatcgacattcagcgaccaggtgccgggcagtgagggcggcggcctgggtggcggcctgcccttcacttcggccgtcggggcattcacggacttcatggcggggccggcaatttttaccttgggcattcttggcatagtggtcgcgggtgccgtgctcgtgttcgggggtgaattaattccccggatcgatccgtcagcttcacgctgccgcaagcactcagggcgcaagggctgctaaaggaagcggaacacgtagaaagccagtccgcagaaacggtgctgaccccggatgaatgtcagctactgggctatctggacaagggaaaacgcaagcgcaaagagaaagcaggtagcttgcagtgggcttacatggcgatagctagactgggcggttttatggacagcaagcgaaccggaattgccagctggggcgccctctggtaaggttgggaagccctgcaaagtaaactggatggctttcttgccgccaaggatctgatggcgcaggggatcaagatcgacggatcgatccggggaattaattccggggcaatcccgcaaggagggtga

SEQ ID NO: 40 - DNA, 38383 bp, Artificial Sequence
  pMR10Y_COVAX191_delHEN
atgaatcggacgtttgaccggaaggcatacaggcaagaactgatcgacgcggggttttccgccgaggatgccgaaaccatcgcaagccgcaccgtcatgcgtgcgccccgcgaaaccttccagtccgtcggctcgatggtccagcaagctacggccaagatcgagcgcgacagcgtgcaactggctccccctgccctgcccgcgccatcggccgccgtggagcgttcgcgtcgtctcgaacaggaggcggcaggtttggcgaagtcgatgaccatcgacacgcgaggaactatgacgaccaagaagcgaaaaaccgccggcgaggacctggcaaaacaggtcagcgaggccaagcaggccgcgttgctgaaacacacgaagcagcagatcaaggaaatgcagctttccttgttcgatattgcgccgtggccggacacgatgcgagcgatgccaaacgacacggcccgctctgccctgttcaccacgcgcaacaagaaaatcccgcgcgaggcgctgcaaaacaaggtcattttccacgtcaacaaggacgtgaagatcacctacaccggcgtcgagctgcgggccgacgatgacgaactggtgtggcagcaggtgttggagtacgcgaagcgcacccctatcggcgagccgatcaccttcacgttctacgagctttgccaggacctgggctggtcgatcaatggccggtattacacgaaggccgaggaatgcctgtcgcgcctacaggcgacggcgatgggcttcacgtccgaccgcgttgggcacctggaatcggtgtcgctgctgcaccgcttccgcgtcctggaccgtggcaagaaaacgtcccgttgccaggtcctgatcgacgaggaaatcgtcgtgctgtttgctggcgaccactacacgaaattcatatgggagaagtaccgcaagctgtcgccgacggcccgacggatgttcgactatttcagctcgcaccgggagccgtacccgctcaagctggaaaccttccgcctcatgtgcggatcggattccacccgcgtgaagaagtggcgcgagcaggtcggcgaagcctgcgaagagttgcgaggcagcggcctggtggaacacgcctgggtcaatgatgacctggtgcattgcaaacgctagggccttgtggggtcagttccggctgggggttcagcagccactcgatcgaggtcccaatacgcaaaccgcctctccccgcgcgttggccgattcattaatgcagctggcacgacaggtttcccgactggaaagcgggcagtgagcgcaacgcaattaatgtgagttagctcactcattaggcaccccaggctttacactttatgcttccggctcgtatgttgtgtggaattgtgagcggataacaatttcacacaggaaacagctatgaccatgattacgccaagcttccatgggatatcgagatctcctgcagagctctagagtcgagactagtctcgacgggcccggtaccccctcgagggggccgcacttaagttacgcgtggatcgtggagctttcgggttttaactataacggtcctaaggtagcgaactcgggtcttgccttaatcccaacaaccggattatctacacggatttcaatagctgatatagcgaatcaccgagattaattaataatacgactcactatagtataagagtgattggcgtccgtacgtaccctctcaactctaaaactcttgtagtttaaatctaatctaaactttataaacggcacttcctgcgtgtccatgcccgcgggcctggtcttgtcatagtgctgacatttgtagttccttgactttcgttctctgccagtgacgtgtccattcggcgccagcagcccacccataggttgcataatggcaaagatgggcaaatacggcctgggcttcaaatgggccccagaatttccatggatgcttccgaacgcatcggagaagttgggtaaccctgagaggtcagaggaggatgggttttgcccctctgctgcgcaagaaccgaaagttaaaggaaaaactttggttaatcacgtgagggtgaattgtagccggcttccagctttggaatgctgtgttcagtctgccataatccgtgatatttttgtagatgaggatccccagaaggtggaggcctcaactatgatggcattgcagttcggtagtgccgtcttggttaagccatccaagcgcttgtctattcaggcatggactaatttgggtgtgcttcccaaaacagctgccatggggttgttcaagcgcgtctgcctgtgtaacaccagggagtgctcttgtgacgcccacgtggcctttcacctttttacggtccaacccgatggtgtatgcctgggtaatggccgttttataggctggttcgttccagtcacagccataccggagtatgcgaagcagtggttgcaaccctggtccatccttcttcgtaagggtggtaacaaagggtctgtgacatccggccacttccgccgcgctgttaccatgcctgtgtatgactttaatgtagaggatgcttgtgaggaggttcatcttaacccgaagggtaagtactcctgcaaggcgtatgccctgctgaagggctatcgcggtgttaagcccatcctgtttgtggaccagtatggttgcgactatactggatgtctcgccaagggtcttgaggactatggcgatctcaccttgagtgagatgaaggagttgttccctgtgtggcgtgactccttggatagtgaagtccttgtggcttggcacgttgatcgagatcctcgggctgctatgcgtctgcagactcttgctactgtacgttgcattgattatgtgggccaaccgaccgaggatgtggtggatggagatgtggtagtgcgtgagcctgctcatcttctcgcagccaatgccattgttaaaagactcccccgtttggtggagactatgctgtatacggattcgtccgttacagaattctgttataaaaccaagctgtgtgaatgcggttttatcacgcagtttggctatgtggattgttgtggtgacacctgtgattttcgtgggtgggttgccggcaatatgatggatggctttccatgtccagggtgtaccaaaaattatatgccctgggaattggaggcccagtcatcaggtgttataccagaaggaggtgttctattcactcagagcactgatacagtgaatcgtgagtcctttaagctctacggtcatgctgttgtgccttttggttctgctgtgtattggagcccttgcccaggtatgtggcttccagtaatttggtcgtcggttaagtcatactctggtttgacttatacaggagtagttggttgtaaggcaattgttcaagagacagacgctatatgtcgttctctgtatatggattatgtccagcacaagtgtggcaatctcgagcagagagctatccttggattggacgatgtctatcatagacagttgcttgtgaataggggtgactatagtctcctccttgagaatgtggatttgtttgttaagcggcgcgctgaatttgcttgcaaattcgccacctgtggagatggtcttgtacccctcctactagatggtttagtgccccgcagttattatttgattaagagtggtcaagctttcacctctatgatggttaattttagccatgaggtgactgacatgtgtatggacatggctttattgttcatgcatgatgttaaagtggccactaagtatgttaagaaggttactggcaaactggccgtgcgctttaaagcgttgggtgtagccgttgtcagaaaaattactgaatggtttgatttagccgtggacattgctgctagtgccgctggatggctttgctaccagctggtaaatggcttatttgcagtggccaatggtgttataacctttgtacaggaggtgcctgagcttgtcaagaattttgttgacaagttcaaggcatttttcaaggttttgatcgactctatgtcggtttctatcttgtctggacttactgttgtcaagactgcctcaaatagggtgtgtcttgctggcagtaaggtttatgaagttgtgcagaaatctttgtctgcatatgttatgcctgtgggttgcagcgaagccacttgtttggtgggtgagattgaacctgcagtttttgaagatgatgttgttgatgtggttaaagccccattaacatatcaaggctgttgtaagccacccacttctttcgagaagatttgtattgtggataaattgtatatggccaagtgtggtgatcaattttaccctgtggttgttgataacgacactgttggcgtgttagatcagtgctggaggtttccctgtgcgggcaagaaagtcgagtttaacgacaagcccaaagtcaggaagataccctccacccgtaagattaagatcaccttcgcactggatgcgacctttgatagtgttctttcgaaggcgtgttcagagtttgaagttgataaagatgttacattggatgagctgcttgatgttgtgcttgacgcagttgagagtacgctcagcccttgtaaggagcatgatgtgataggcacaaaagtttgtgctttacttgataggttggcaggagattatgtctatctttttgatgagggaggcgatgaagtgatcgccccgaggatgtattgttccttttctgctcctgatgacgaggactgcgttgcagcggatgttgtagatgcagatgaaaaccaagatgatgatgccgaggactcagcagtccttgtcgctgatacccaagaagaggacggcgttgccaaggggcaggttgaggcggattcggaaatttgcgttgcgcatactggtagtcaagaagaattggctgagcctgatgctgtcggatctcaaactcccatcgcctctgctgaggaaaccgaagtcggagaggcaagcgacagggaagggattgctgaggcgaaggcaactgtgtgtgctgatgctgtagatgcctgccccgatcaagtggaggcatttgaaattgaaaaggtcgaggactctatcttggatgagcttcaaactgaacttaatgcgccagcggacaagacctatgaggatgtcttggcattcgatgccgtatgctcagaggcgttgtctgcattctatgctgtgccgagtgatgagacgcactttaaagtgtgtggattctattcgcctgctatagagcgcactaattgttggctgcgttctactttgatagtaatgcagagtctacctttggaatttaaagacttggagatgcaaaagctctggttgtcttacaaggccggctatgaccaatgctttgtggacaaactagttaagagcgtgcccaagtctattatccttccacaaggtggttatgtggcagattttgcctatttctttctaagccagtgtagctttaaagcttatgctaactggcgttgtttagagtgtgacatggagttaaagcttcaaggcttggacgccatgtttttctatggggacgttgtgtctcatatgtgcaagtgtggtaatagcatgaccttgttgtctgcagatataccctacactttgcattttggagtgcgagatgataagttttgcgctttttacacgccaagaaaggtctttagggctgcttgtgcggtagatgttaatgattgtcactctatggctgtagtagagggcaagcaaattgatggtaaagtggttaccaaatttattggtgacaaatttgattttatggtgggttacgggatgacatttagtatgtctccttttgaactcgcccagttatatggttcatgtataacaccaaatgtttgttttgttaaaggagatgttataaaggttgttcgcttagttaatgctgaagtcattgttaaccctgctaatgggcgtatggctcatggtgccggcgtcgccggcgccatagctgaaaaggcgggcagtgcttttattaaagaaacctccgatatggtgaaggctcagggcgtttgccaggttggtgaatgctatgaatctgccggtggtaagttatgtaaaaaggtgcttaacattgtagggccagatgcgcgagggcatggcaagcaatgctattcacttttagagcgtgcttatcagcatattaataagtgtgacaatgttgtcactactttaatttcggctggtatatttagtgtgcctactgatgtctccctaacttacttacttggtgtagtgacaaagaatgtcattcttgtcagtaacaaccaggatgattttgatgtgatagagaagtgtcaggtgacctccgttgctggtaccaaagcgctatcacttcaattggccaaaaatttgtgccgtgatgtaaagtttgtgacgaatgcatgtagttcgctttttagtgaatcttgctttgtctcaagctatgatgtgttgcaggaagttgaagcgctgcgacatgatatacaattggatgatgatgctcgtgtctttgtgcaggctaatatggactgtctgcccacagactggcgtctcgttaacaaatttgatagtgttgatggtgttagaaccattaagtattttgaatgcccgggcgggatttttgtatccagccagggcaaaaagtttggttatgttcagaatggttcatttaaggaggcgagtgttagccaaataagggctttactcgctaataaggttgatgtcttgtgtactgttgatggtgttaacttccgctcctgctgcgtagcagagggtgaagtttttggcaagacattaggttcagtcttttgtgatggcataaatgtcaccaaagttaggtgtagtgccatttacaagggtaaggttttctttcagtacagtgatttgtccgaggcagatcttgtggctgttaaagatgcctttggttttgatgaaccacaactgctgaagtactacactatgcttggcatgtgtaagtggccagtagttgtttgtggcaattattttgctttcaagcagtcaaataataattgctacatcaacgtggcatgtttaatgctgcaacacttgagtttaaagtttcctaagtggcaatggcaagaggcttggaacgagttccgctctggtaaaccactaaggtttgtgtccttggtattagcaaagggcagctttaaatttaatgaaccttctgattctatcgattttatgcgtgtggtgctacgtgaagcagatttgagtggtgccacgtgcaatttggaatttgtttgtaaatgtggtgtgaagcaagagcagcgcaaaggtgttgacgctgttatgcattttggtacgttggataaaggtgatcttgtcaggggttataatatcgcatgtacgtgcggtagtaaacttgtgcattgcacccaatttaacgtaccatttttaatttgctccaacacaccagagggtaggaaactgcccgacgatgttgttgcagctaatatttttactggtggtagtgtgggccattacacgcatgtgaaatgtaaacccaagtaccagctttatgatgcttgtaatgttaataaggtttcggaggctaagggtaattttaccgattgcctctaccttaaaaatttaaagcaaaccttctcgtctgtgctgacgactttttatttagatgacgtaaagtgtgtggagtataagccagatttatcgcagtattactgtgagtctggtaaatattatacaaaacccattattaaggcccaatttagaacatttgagaaggttgatggtgtctataccaactttaaattggtgggacatagtattgctgaaaaactcaatgctaagctgggatttgattgtaattctccctttgtggagtacaaaattacagagtggccaacagctactggagatgtggtgttggctagtgatgatttgtatgtaagtcggtacttaagcgggtgcattacttttggtaaaccggttgtctggcttggccatgaggaagcatcgctgaaatctctcacatattttaatagacctagtgtcgtttgtgaaaataaatttaacgtgttgcccgttgatgtcagtgaacccacggacaaggggcctgtgcctgctgcagtccttgttaccggcgtccctggagctgatgcgtcagctggtgccggtattgccaaggagcaaaaagcctgtgcttctgctagtgtggaggatcaggttgttacggaggttcgtcaagagccatctgtttcagctgctgatgtcaaagaggttaaattgaatggtgttaaaaagcctgttaaggtggaaggtagtgtggttgttaatgatcccactagcgaaaccaaagttgttaaaagtttgtctattgttgatgtctatgatatgttcctgacagggtgtaagtatgtggtttggactgctaatgagttgtctcgactagtaaattcaccgactgttagggagtatgtgaagtggggtatgggaaagattgtaacacccgctaagttgttgttgttaagagatgagaagcaagagttcgtagcgccaaaagtagtcaaggcgaaagctattgcctgctattgtgctgtgaagtggtttctcctctattgttttagttggataaagtttaatactgacaataaggttatatacaccacagaagtagcttcaaagcttactttcaagttgtgctgtttggcctttaagaatgccttacagacgtttaattggagcgttgtgtctaggggctttttcctagttgcaacggtctttttactctggtttaactttttgtatgctaatgttattttgagtgacttctatttgcctaatattgggcctctccctacgtttgtgggacagatagttgcgtggtttaagactacatttggtgtgtcaaccatctgtgatttctaccaggtgacggatttgggctatagaagttcgttttgtaatggaagtatggtatgtgaactatgcttctcaggttttgatatgctggacaactatgatgctataaatgttgttcaacacgttgtagataggcgtttgtcctttgactatattagcctatttaaactggtagttgagcttgtaatcggctactctctttatactgtgtgcttctacccactgtttgtccttattggaatgcagttattgaccacatggttgcctgaattctttatgctggagactatgcattggagtgctcgtttgtttgtgtttgttgccaatatgcttccagcttttacgttactgcgattttacatcgtggtgacagctatgtataaggtctattgtctttgtagacatgttatgtatggatgtagtaagcctggttgcttgttttgttataagagaaaccgtagtgtccgtgttaagtgtagcaccgttgttggtggttcactacgctattacgatgtaatggctaacggcggcacaggtttctgtacaaagcaccagtggaactgtcttaattgcaattcctggaaaccaggcaatacattcataactcatgaagcagcggcggacctctctaaggagttgaaacgccctgtgaatccaacagattctgcttattactcggtcacagaggttaagcaggttggttgttccatgcgtttgttctacgagagagatggacagcgtgtttatgatgatgttaatgctagtttgtttgtggacatgaatggtctgctgcattctaaagttaaaggtgtgcctgaaacgcatgttgtggttgttgagaatgaagctgataaagctggttttctcggcgccgcagtgttttatgcacaatcgctctacagacctatgttgatggtggaaaagaaattaataactaccgccaacactggtttgtctgttagtcgaactatgtttgacctttatgtagattcattgctgaacgtcctcgacgtggatcgcaagagtctaacaagttttgtaaatgctgcgcacaactctctaaaggagggtgttcagcttgaacaagttatggatacctttattggctgtgcccgacgtaagtgtgctatagattctgatgttgaaaccaagtctattaccaagtccgtcatgtcggcagtaaatgctggcgttgattttacggatgagagttgtaataacttggtgcctacctatgttaaaagtgacactatcgttgcagccgatttgggtgttcttattcagaataatgctaagcatgtacaggctaatgttgctaaagccgctaatgtggcttgcatttggtctgtggatgcttttaaccagctatctgctgacttacagcataggctgcgaaaagcatgttcaaaaactggcttgaagattaagcttacttataataagcaggaggcaaatgttcctattttaactacaccgttctctcttaaagggggcgctgtttttagtagaatgttacaatggttgtttgttgctaatttgatttgtttcattgtgttgtgggcccttatgccaacatatgcagtgcacaaatcggatatgcagttgcctttatatgccagttttaaagttatagataacggtgtgctaagggatgtgtctgttactgacgcatgcttcgcaaacaaatttaatcaattcgaccaatggtatgagtctacttttggtcttgcttattaccgcaactctaaggcttgtcctgttgtggttgctgtaatagatcaagacattggccataccttatttaatgttcctaccacagttttaagatatggatttcatgtgttgcattttataacccatgcatttgctactgatagcgtgcagtgttacacgccacatatgcaaatcccctatgataatttctatgctagtggttgcgtgttgtcatccctctgtactatgcttgcgcatgcagatggaaccccgcatccttattgttatacagggggtgttatgcataatgcctctctgtatagttctttggctcctcatgtccgttataacctggctagttcaaatggttatatacgttttcccgaagtggttagtgaaggcattgtgcgtgttgtgcgcactcgctctatgacctactgcagggttggtttatgtgaggaggccgaggagggtatctgctttaattttaatcgttcatgggtattgaacaacccgtattatagggccatgcctggaactttttgtggtaggaatgcttttgatttaatacatcaagttttaggaggattagtgcggcctattgatttctttgccttaacggcgagttcagtggctggtgctatccttgcaattattgtcgttttggctttctattatttaatcaagcttaagcgtgcctttggtgactacactagtgttgtggttatcaatgtaattgtgtggtgtataaattttctgatgctttttgtgtttcaggtttatcccacattgtcttgtttatatgcttgtttctacttctacaccacgctttatttcccttcggagataagtgttgttatgcatttgcaatggcttgtcatgtatggtgctattatgcccttgtggttttgcattatttacgtggcagtcgttgtttcaaaccatgcattgtggttgttctcttactgccgcaaaattggtaccgaggttcgtagtgacggcacatttgaggaaatggcccttactacctttatgattactaaagaatcttattgtaagttgaaaaactctgtttctgatgttgcttttaacaggtacttgagtctttacaacaagtaccgttacttcagtggcaaaatggatactgccgcttatagagaggctgcctgttcacaactggcaaaggcaatggaaacatttaaccataataatggtaatgatgttctctatcagcctccaaccgcctctgttactacatcatttttacagtctggtatagtgaagatggtgtcgcccacctctaaagtggagccttgtattgttagtgttacttatggtaacatgacacttaatgggttgtggttggatgataaagtttattgcccaagacatgttatctgttcttcagctgacatgacagaccctgattatcctaatttgctttgtagagtgacatcaagtgatttttgtgttatgtctggtcgtatgagccttactgtaatgtcttatcaaatgcagggctgccaacttgttttgactgttacactgcaaaatcctaacacgcctaagtattccttcggtgttgttaagcctggtgagacatttactgtactggctgcatacaatggcagacctcaaggagccttccatgttacgcttcgtagtagccataccataaagggctcctttctatgtggatcctgcggttctgtaggatatgttttaactggcgatagtgtacgatttgtttatatgcatcagctagagttgagtactggttgtcataccggtactgactttagtgggaacttttatggtccctatagagatgcgcaagttgtacaattgcctgttcaggattatacgcagactgttaatgttgtagcttggctttatgctgctatttttaacagatgcaactggtttgtgcaaagtgatagttgttccctggaggagtttaatgtttgggctatgaccaatggttttagctcaatcaaagccgatcttgtcttggatgcgcttgcttctatgacaggcgttacagttgaacaggtgttggccgctattaagaggctgcattctggattccagggcaaacaaattttaggtagttgtgtgcttgaagatgagctgacaccaagtgatgtttatcaacaactagctggtgtcaagctacagtcaaagcgcacaagagttataaaaggtacatgttgctggatattggcttcaacgtttttgttctgtagcattatctcagcatttgtaaaatggactatgtttatgtatgttactacccatatgttgggagtgacattgtgtgcactttgttttgtaagctttgctatgttgttgatcaagcataagcatttgtatttaactatgtacatcatgcctgtgttatgcacactgttttacaccaactatttggttgtgtacaaacagagttttagaggtctagcttatgcttggctttcacactttgtccctgctgtagattatacatatatggatgaagttttatatggtgttgtgttgctagtagctatggtgtttgttaccatgcgtagcataaaccacgacgtcttttctattatgttcttggttggtagacttgtcagcctggtatccatgtggtattttggagccaatttagaggaagaggtactattgttcctcacatccctatttggcacgtacacatggactactatgttgtcattggctaccgctaaggttattgctaaatggttggctgtgaatgtcttgtacttcacagacgtaccgcaaattaaattagttctgttgagctacttgtgtattggttatgtgtgttgttgttattggggaatcttgtcactccttaatagcatttttaggatgccattgggcgtctacaattataaaatctccgttcaggagttacgttatatgaatgctaatggcttgcgcccacctagaaatagttttgaggccctgatgcttaattttaagctgttgggaattggtggtgtgccagtcattgaagtatctcaaattcaatcaagattgacggatgttaaatgtgctaatgttgtgttgcttaattgcctccagcacttgcatattgcatctaattctaagttgtggcagtattgtagtactttgcacaatgaaatactggctacatctgatttgagcgtggccttcgataagttggctcaactcttagttgttttatttgctaatccagcagcagtggatagcaagtgccttgcaagtattgaagaagtgagcgatgattacgttcgcgacaatactgtcttgcaagccttacagagtgaatttgttaatatggctagcttcgttgagtatgaacttgctaagaagaatctagatgaggctaaggctagcggctctgccaatcaacagcagattaagcagctagagaaggcgtgtaatattgctaagtcagcatatgagcgcgacagagctgttgctcgtaagctggaacgtatggctgatttagctcttacaaacatgtataaagaagctagaattaatgataagaagagtaaggtagtgtctgcattgcaaaccatgctctttagtatggtgcgtaagctagataaccaagctcttaattctattttagacaacgcagttaagggttgtgtacctttgaatgcaataccatcattgacttcgaacactctgactataatagtgccagataagcaggtttttgatcaggttgtggataatgtgtatgtcacctatgctgggaatgtatggcatatacagtttattcaagatgctgatggtgctgttaaacaattgaatgagatagatgttaattcaacctggcctctagtcattgctgcaaataggcataatgaagtgtctactgttgttttgcagaacaatgagttgatgcctcagaagttgagaactcaggttgtcaatagtggctcagatatgaattgtaatactcctacccagtgttactataatactactggcacgggtaagattgtgtatgctatacttagtgactgtgacggcctgaagtacactaagatagtaaaagaagatggaaattgtgttgttttggaattggatcctccctgtaagttttctgttcaggatgtgaagggccttaaaattaagtacctttactttgtgaaggggtgtaatacactggctagaggctgggttgtaggcaccttatcctcgacagtgagattgcaggcgggtacggcaactgagtatgcctccaactctgcaatactgtcgctgtgtgcgttttctgtagatcctaagaaaacgtacttggattatataaaacagggtggagttcccgttactaattgtgttaagatgttatgtgaccatgctggcactggtatggccattactattaagccggaggcaaccactaatcaggattcttatggtggtgcttccgtttgtatatattgccgctcgcgtgttgaacatccagatgttgatggattgtgcaaattacgcggcaagtttgtccaagtgcccttaggcataaaagatcctgtgtcatatgtgttgacgcatgatgtttgtcaggtttgtggcttttggcgagatggtagctgttcctgtgtaggcacaggctcccagtttcagtcaaaagacacgaactttttaaacggattcggggtacaagtgtaaatgcccgtcttgtaccctgtgccagtggcttggacactgatgttcaattaagggcatttgacatttgtaatgctaatcgagctggcattggtttgtattataaagtgaattgctgccgcttccagcgtgtagatgaggacggcaacaagttggataagttctttgttgttaaaagaactaatttagaagtgtataacaaggagaaagaatgctatgagttgacaaaagaatgcggtgttgtggctgaacacgagttcttcacatttgatgtggagggaagtcgggtaccacacatagtccgtaaagatctttcaaagtttactatgttagatctttgctatgcattgcgtcattttgaccgcaatgattgttcaactcttaaggaaattctccttacatatgctgagtgtgaagagtcctacttccaaaagaaggactggtatgattttgttgagaatcctgatataattaatgtgtacaagaagcttggtcctatatttaatagagccctgcttaacactgccaagtttgcagacgcattagtggaggcaggcttagtaggtgttttaacacttgataatcaagatttatatggtcaatggtatgactttggagattttgtcaagacagtacctggttgtggtgttgccgtggcagactcttattattcatatatgatgccaatgctgactatgtgtcatgcgttggatagtgagttgtttgttaatggtacttatagggagtttgaccttgttcagtatgattttactgatttcaagctagagctgttcactaagtattttaagcattggagtatgacctaccacccgaacacctgtgagtgcgaggatgacaggtgcattattcattgcgccaattttaatatacttttcagcatggtcttacctaagacctgttttgggcctcttgttaggcagatatttgtggatggtgttcctttcgttgtgtcgatcggttaccattataaagaattaggtgttgttatgaatatggatgtggatacacatcgttatcgcttgtctcttaaggacttgcttttgtatgctgcagaccctgcccttcatgtggcgtctgctagtgcactgcttgatttgcgcacatgttgttttagcgttgcagctattacaagtggcgtaaaatttcaaacagttaaacctggaaattttaatcaggatttctacgagtttattttgagtaaaggcctgcttaaagaggggagctccgttgatttgaagcacttcttctttacgcaggatggtaatgctgctattactgattacaattactacaagtataatctacccaccatggtggatattaagcagttgttgtttgttttagaagttgttaataagtacttcgagatctatgagggtgggtgtatacccgcaacacaggtcattgttaataattatgacaagagtgctggctatccatttaataaatttggaaaggccaggctctattatgaggcattatcatttgaggagcaggatgaaatttatgcgtataccaaacgcaatgtcctgccgaccctaactcaaatgaatcttaaatatgctattagtgctaagaatagggcccgcaccgttgctggtgtctctattctcagtactatgactggcagaatgtttcatcaaaagtgtctaaagagtatagcagctactcgcggtgttcctgtagttataggcaccacgaagttctatggcggttgggatgatatgttacgccgccttattaaagatgttgatagtcctgtactcatgggttgggactatcctaaatgtgatcgtgctatgccaaacatactgcgtattgttagtagtttggtgctagcccgtaaacatgattcgtgctgttcgcatacggatagattctatcgtcttgcgaacgagtgcgcccaagttttgagtgaaattgttatgtgtggtggttgttattatgttaaaccaggtggcactagtagtggggatgcaaccactgcttttgctaattctgtgtttaacatttgtcaagctgtttccgccaatgtatgctcgcttatggcatgcaatggacacaaaattgaagatttgagtatacgcgagttacaaaagcgcctatactctaatgtctatcgtgcggaccatgttgaccccgcatttgttagtgagtattatgagtttttaaacaagcattttagtatgatgattttgagtgatgatggtgttgtgtgttataattcagagtttgcgtccaagggttatattgctaatataagtgcctttcaacaggtattatattatcaaaacaacgtgtttatgtctgaggccaaatgttgggtagaaacagacatcgaaaagggaccgcatgaattttgttctcaacatacaatgctagtcaagatggatggtgatgaagtctaccttccataccctgatccttcgagaatcttaggagcaggctgttttgttgatgatttactcaagactgatagcgttctcttgatagagcgtttcgtaagtcttgcaattgatgcttatcctttagtataccatgagaacccagagtatcaaaatgtgttccgggtatatttagaatacatcaagaagctgtacaatgatctcggtaatcagatcctggacagctacagtgttattttaagtacttgtgatggtcaaaagtttactgacgagacgttttacaagaacatgtatttaagaagtgcagtgctgcaaagcgttggtgcctgcgttgtctgtagttctcaaacatcattacgttgtggcagttgcatacgcaagcctttgctgtgttgcaaatgcgcctatgatcatgttatgtccactgatcataaatatgtcctgagtgtgtcaccatatgtgtgtaattcaccgggatgtgatgtaaatgatgttaccaaattgtatttaggtggtatgtcatattattgtgaggaccataaaccacagtattcattcaaattggtgatgaatggtatggtttttggtttatataagcagtcttgtactggttcgccctacatagaggattttaataaaatcgctagttgcaaatggacagaagtcgatgattatgtgctagctaatgaatgcaccgaacgccttaaattgtttgccgcagaaacgcagaaggccacagaagaggcctttaagcaatgttatgcgtcagcaacgatccgtgagatcgtgagcgatcgggagttaattttatcttgggaaattggtaaagtccgcccgccacttaataaaaattacgtgttcaccggctaccattttactaataatggtaagacagttttaggtgagtatgtttttgataagagtgagttgactaatggtgtgtattatcgcgccacaaccacttataagttatctgtaggtgatgtgttcattttaacatcacacgcagtgtctagtttaagtgctcctacattagtaccgcaggagaattatactagcattcgttttgctagtgtttatagtgtgcctgagacgtttcagaataatgtgcctaattatcagcacattggaatgaagcgctattgtactgtacagggaccgcctggtactggtaagtcccatctagccattgggctagctgtttattattgtacagcgcgcgtggtgtataccgctgctagccatgctgcagttgacgcgctgtgtgaaaaggcacataaatttctcaacatcaacgactgcacgcgtattgttcctgcaaaggtgcgtgtagattgttatgataaattcaaggtcaatgacaccactcgcaagtatgtgtttactacaataaatgcattacctgagttggtgactgacattattgtcgttgatgaagttagtatgcttaccaactatgagctgtctgttattaacagtcgtgttagggctaagcattatgtgtatattggcgacccggcgcagttacctgcaccacgtgtgctactgaataagggaactctagaacctagatattttaattccgttaccaagctaatgtgttgtttgggtccagatattttcttgggcacctgttatagatgccctaaggagattgtggatacggtgtcagccttggtttataataataagctgaaggctaaaaatgataatagctccatgtgctttaaggtttattataagggccagactacacatgagagttctagtgctgttaatatgcagcaaatacatttaatttccaagtttctgaaggcaaaccccagttggagtaacgccgtatttattagtccttataactcgcagaactatgttgctaagagagtcttgggattacaaacccagacagtagactcagcgcagggttctgaatatgattttgttatctactcacagactgcggaaacagcgcattctgtcaatgtaaatagattcaatgttgctattacacgtgctaagaagggtattctctgtgtcatgagtagtatgcaattatttgagtctcttaattttactacactgacgttggataagattaacaatccacgattacagtgtactacaaatttgtttaaggattgtagcaggagctatgtaggatatcacccagcccatgcaccatcctttttggcagttgatgacaaatataaggtaggcggtgatttagccgtttgccttaatgttgctgattctgctgtcacttattcgcggcttatatcactcatgggattcaagcttgacttgacccttgatggttattgtaagctgtttataactagagatgaagctatcaaacgtgttagagcctgggttggcttcgatgcagaaggtgcccatgcgatacgtgatagcattgggacaaatttcccattacaattaggcttttcgactggaattgattttgttgtcgaagccactggaatgtttgctgagagagatggttatgtctttaaaaaggcagccgcacgagctcctcctggcgaacaatttaaacaccttatcccacttatgtcaagagggcagaaatgggatgtggttcgcattagaatagtacaaatgttgtcagaccacctagtggatttggcagacagtgttgtacttgtgacgtgggctgccagctttgagctcacatgtttgcgatatttcgctaaagttggaagagaagttgtgtgtagtgtctgcaccaagcgtgcgacatgttttaattctagaactggatactatggatgctggcgacatagttattcctgtgattacctgtacaacccactaatagttgacattcaacagtggggatatacaggatctttaactagcaatcatgatcctatttgcagcgtgcataagggtgctcatgttgcatcatctgatgctatcatgacccggtgtctagctgttcatgattgcttttgtaagtctgttaattggaatttagaataccccattatttcaaatgaggtcagtgttaatacctcctgcaggttattgcagcgcgtaatgtttagggctgcgatgctatgcaataggtatgatgtgtgttatgacattggcaaccctaaaggtcttgcctgtgtcaaaggatatgattttaagttctatgacgcctcccctgttgttaagtcggtcaaacagtttgtttacaaatacgaggcacataaagatcaatttttagatggtttgtgtatgttttggaactgcaatgtggataagtatccagcgaatgcagttgtgtgtaggtttgacacgcgtgtgttgaacaaattaaatctccctggctgtaatggtggcagtttgtatgttaacaaacatgcattccacaccagtccctttacccgggctgccttcgagaatttgaagcctatgcctttcttttattattcagatacgccctgtgtgtatatggaaggcatggaatctaagcaggtcgattatgtcccattgagaagcgctacatgcatcacaagatgcaatttaggtggcgctgtttgtttaaaacatgctgaggagtatcgtgagtaccttgagtcttacaatacggcaaccacagcgggttttactttttgggtctataagacttttgatttttacaacctttggaatacttttactaggctccaaagtttagaaaatgtagtgtataacctggtcaacgctggacactttgatggccgggcgggtgaactgccttgtgctgttataggtgagaaagtcattgccaagattcaaaatgaggatgtcgtggtctttaaaaataacacgccattccccactaatgtggctgtcgaattatttgctaagcgcagtattcggccccaccccgagcttaagctctttagaaatttgaatattgacgtgtgctggagtcacgtcctttgggattatgctaaggatagtgtgttttgcagttcgacgtataaggtctgcaaatacacagatttacagtgcattgaaagcttgaatgtactttttgatggtcgtgataatggtgctcttgaagcttttaagaagtgccggaatggcgtctacattaacacgacaaaaattaaaagtctgtcgatgattaaaggcccacaacgtgccgatttgaatggcgtagttgtggagaaagttggagattctgatgtggaattttggtttgctgtgcgtaaagacggtgacgatgttatcttcagccgtacagggagccttgaaccgagccattaccggagcccacaaggtaatccgggtggtaatcgcgtgggtgatctcagcggtaatgaagctctagcgcgtggcactatctttactcaaagcagattattatcttctttcacacctcgatcagagatggagaaagattttatggatttagatgatgatgtgttcattgcaaaatatagtttacaggactacgcgtttgaacacgttgtttatggtagttttaaccagaagattattggaggtttgcatttgcttattggcttagcccgtaggcagcaaaaatccaatctggtaattcaagagttcgtgacatacgactctagcattcattcgtactttatcactgacgagaacagtggtagtagtaagagtgtgtgcactgttattgatttattgttagatgattttgtggacattgtaaagtccctgaatctaaagtgtgtgagtaaggttgttaatgttaatgtggattttaaggacttccagtttatgttgtggtgcaatgaggagaaggtcatgactttctatcctcgtttgcaggctgctgctgactggaaacctggttatgttatgcctgtcttatataagtatttggaatcgcctctggaaagagtaaacctctggaattatggcaagccgattactttacctacaggatgtatgatgaatgttgctaagtatactcaattatgtcaatatttgagcactacaacattagcagttccggctaatatgcgtgtcttacaccttggtgccggttcggataagggtgttgcccctgggtctgcagttcttaggcagtggctaccagcgggaagtattcttgtagataatgatgtgaatccatttgtgagtgacagtgtcgcctcatattatggaaattgtataaccttaccctttgattgtcagtgggatctgataatttctgatatgtacgaccctcttactaagaacattggggagtacaacgtgagtaaagatggattctttacttacctctgtcatttaattcgtgacaagttggctctgggtggcagtgttgccataaaaataacagagttttcttggaacgctgagttatatagtttaatggggaagtttgcgttctggacaatcttttgcaccaacgtaaacgcctcttcaagtgaaggatttttgattggcataaattggttgaataagacccgtaccgaaattgacggtaaaaccatgcatgccaattatctgttttggagaaatagtacaatgtggaatggaggggcttacagtctctttgacatgagtaagttccctttgaaagcggctggtacggctgttgttagccttaaaccagaccaaataaatgacttagtcctctccttgattgagaagggcaagttattagtgcgtgatacacgcaaagaagtttttgttggcgatagcctagtaaatgtcaaataaacgaacaatgtttgtttttcttgttttattgccactagtctctagtcagtgtgttaatcttacaaccagaactcaattaccccctgcatacactaattctttcacacgtggtgtttattaccctgacaaagttttcagatcctcagttttacattcaactcaggacttgttcttacctttcttttccaatgttacttggttccatgctatacatgtctctgggaccaatggtactaagaggtttgataaccctgtcctaccatttaatgatggtgtttactttgcttccactgagaagtctaacataataagaggctggatttttggtactactttagattcgaaaacccagtccctacttattgttaataacgctactaatgttgttatcaaagtctgtgaatttcaattttgtaacgatccatttttgggtgtttattaccacaaaaacaacaaaagttggatggaaagtgagttcagagtttattctagtgcgaataattgcacttttgaatacgtctctcagccttttcttatggaccttgaaggaaaacagggtaatttcaaaaatcttagggaatttgtgttcaagaatattgatggttacttcaagatatactctaagcacacgcctattaatttagtgcgtgatctccctcagggtttttcggctttagaaccattggtagatttgccaataggtattaacatcactaggtttcaaactttacttgctttacatagaagttatttaactcctggtgattcttcttcaggttggacagctggtgctgcagcttattatgtgggttatcttcaacctaggacttttctactgaagtacaatgaaaatggaaccattacagatgctgtagactgtgcacttgaccctctctcagaaacaaagtgtacgttgaaatccttcactgtagaaaaaggaatctatcaaacttctaactttagagtccaaccaacagaatctattgttagatttcctaacatcacaaacttgtgcccttttggtgaagtttttaacgccaccagatttgcatctgtttatgcttggaacaggaagagaatcagcaactgtgttgctgattattctgtcctgtataattccgcatcattttccacttttaagtgttatggagtgtctcctactaaattaaatgatctctgctttactaatgtctatgcagattcatttgtaattagaggtgatgaagtcagacaaatcgctccagggcaaactggaaagattgctgattataactacaaattaccagatgattttacaggctgcgttatagcttggaattctaacaatcttgattctaaggttggtggtaattataattacctgtacagattgtttaggaagtctaatctcaaaccttttgagagagatatttcaactgaaatctatcaggccggtagcacaccttgtaatggtgttgaaggttttaattgttactttcctctgcaatcatatggtttccaacccactaatggtgttggttaccaaccatacagagtagtagtactttcttttgaacttctacatgcaccagcaactgtttgtggacctaaaaagtctactaatttggttaagaacaagtgtgtcaatttcaacttcaatggtttaacaggcacaggtgttcttactgagtctaacaaaaagtttctgcctttccaacaatttggcagagacattgctgacactactgatgctgttcgtgatccacaaacacttgagattcttgacattacaccatgttcttttggtggtgtcagtgttataacaccaggaacaaatacttctaaccaggttgctgttctttatcaggatgttaactgcacagaagtccctgttgctattcatgcagatcaacttactcctacttggcgtgtttattctacaggttctaatgtttttcaaacacgtgcaggctgtttaataggggctgaacatgtcaacaactcatatgagtgtgacatacccattggtgcaggtatatgcgctagttatcagactcagactaattctcctcggagagcaagaagtgtagctagtcaatccatcattgcctacactatgtcacttggtgcagaaaattcagttgcttactctaataactctattgccatacccacaaattttactattagcgttaccacagaaattctaccagtgtctatgaccaagacatcagtagattgtacaatgtacatttgtggtgattcaactgaatgcagcaatcttttgttgcaatatggcagtttttgtacacaattaaaccgtgctttaactggaatagctgttgaacaagacaaaaacacccaagaagtttttgcacaagtcaaacaaatttacaagacaccaccaattaaagattttggcggttttaattttagccagatactgccagatccatcaaaaccaagcaagaggtcatttattgaagatctactgttcaacaaagtgacacttgcagatgctggcttcatcaaacaatatggtgattgccttggtgatattgctgctagagacctcatttgtgcacaaaagtttaacggccttactgttttgccacctttgctcacagatgaaatgattgctcaatacacttctgcactgttagcaggtacaatcacttctggttggacttttggtgcaggtgctgcattacaaataccatttgctatgcaaatggcttataggtttaatggtattggagttacacagaatgttctctatgagaaccaaaaattgattgccaaccaatttaatagtgctattggcaaaattcaagactcactttcttccacagcaagtgcacttggaaaacttcaagatgtggtcaaccaaaatgcacaagctttaaacacgcttgttaaacaacttagctccaattttggtgcaatttcaagtgttttaaacgacatcctttcacgtcttgacaaagttgaggctgaagtgcaaattgataggttgatcacaggcagacttcaaagtttgcagacatatgtgactcaacaattaattagagctgcagaaatcagagcttctgctaatcttgctgctactaaaatgtcagagtgtgtacttggacaatcaaaaagagttgacttttgcggaaagggctatcatcttatgtcatttcctcagtcagcacctcatggtgtcgtctttttgcatgtgacttatgtccctgcacaagaaaagaacttcacaactgctcctgccatttgtcatgatggaaaagcacactttcctcgtgaaggtgtctttgtttcaaatggcacacactggtttgtaacacaaaggaatttttatgaaccacaaatcattactacagacaacacatttgtgtctggtaactgtgatgttgtaataggaattgtcaacaacacagtttatgatcctttgcaacctgaattagactcattcaaggaggagcttgataaatacttcaagaaccatacctcaccagatgttgatttaggtgacatctctggcattaatgcttcagttgtaaacattcagaaagaaatcgaccgcctcaatgaggttgccaagaatttaaatgaatctctcatcgatctccaagaacttggaaagtatgagcagtatataaaatggccatggtacatttggctaggttttatagctggcttgattgccatagtaatggtgacaattatgctttgctgtatgaccagttgctgtagttgtctcaagggctgttgttcttgtggatcctgctgcaaatttgacgaggacgactctgagccagtgctcaaaggagtcaaattacattacacataactatcacagcctctcctggaaagacagaaaatctaaacaatttatagcattctcattgctacctggccccgtaagaggcagtcatagctatggccgtgttggtcctaaggctacattggctgctgtctttattggtccatttattgtagcatgtatgctaggcattggcctagtttatttattgcaattgcaagttcaaatttttcatgttaaggataccatacgtgtgactggcaagccagccactgtgtcttatactacaagtacaccagtaacaccgagcgcgacgacgctcgatggtactacgtatactttaattagacccactagctcttatacaagagtttatcttggtactccaagaggttttgattatagtacatttgggcctaagaccctagattatgttactaatctaaacctcatcttaattctggtcgtccatatacttttaaggcattgtccaggcatatgaggccaacagccacatggatttggcatgtgagtgatgcatggttacgccgcacgcgggactttggtgtcattcgcctagaagatttttgttttcaatttaattatagccaaccccgagttggttattgtagagttcctttaaaggcttggtgtagcaaccagggtaaatttgcagcgcagtttaccctaaaaagttgcgaaaaaccaggtcacgaaaaatttattactagcttcacggcctacggcagaactgtccaacaggccgttagcaagttagtagaagaagctgttgattttattctttttagggccacgcagctcgaaagaaatgtttaatttattccttacagacacagtatggtatgtggggcagattatttttatattcgcagtgtgtttgatggtcaccataattgtggttgccttccttgcgtctatcaaactttgtattcaactttgcggtttatgtaatactttggtgctgtccccttctatttatttgtatgataggagtaagcagctttataagtactataatgaagaaatgagactgcccctattagaggtggatgatatctaatccaaacattatgagtagtactactcaggccccagagcccgtctatcaatggaccgccgacgaggcagttcaattccttaaggaatggaacttctcgttgggcattatactactctttattactatcatactacagttcggttacacgagccgtagcatgtttatttatgttgtgaaaatgataatcttgtggttaatgtggccactgactattgttttgtgtattttcaattgcgtgtatgcgctaaataatgtgtatcttggattttctatagtgtttactatagtgtccattgtaatctggatcatgtattttgtgaacagcataaggttgtttatcaggactggtagctggtggagcttcaaccccgaaacaaacaaccttatgtgtatagatatgaaaggtaccgtgtatgttagacccattattgaggattaccatacactaacagccactattattcgtggccacctctacatgcaaggtgttaagctaggcaccggtttctctttgtctgacttgcccgcttatgttacagttgctaaggtgtcacacctttgcacttataagcgcgcattcttagacaaggtagacggtgttagcggttttgctgtttatgtgaagtccaaggtcggaaattaccgactgccctcaaacaaaccgagtggcgcggacaccgcattgttgagaacctaatctaaactttaaggagagaatgaatcctatgtcggcgctcggtggtaacccctcgcgagaaagtcgggataggacactctctatcagaatggatgtcttgctgtcataacagatagagaaggttgtggcagaccctgtatcaattagttgaaagagattgcaaaatagagaatgtgtgagagaagttagcaaggtcctacgtctaaccataagaacggcgataggcgccccctgggaacagctcacatcagggtactattcctgcaatgccctagtaaatgaatgaagttgatcatggccaattggaagaatcacaaaaaaaaaaaaaaaaaaaacggccggtttaaacgctacagtccaagttccaagcgggatactagatgtataatgtccgccatgcagacgaaaccagtcggagattaccgagcattctatcacgtcggcgaccaatagtgagcttagggataacagggtaataaacgatccccgggaattcactggccgtcgttttacaacgtcgtgactgggaaaaccctggcgttacccaacttaatcgccttgcagcacatccccctttcgccagctggcgtaatagcgaagaggcccgcaccgatcgcccttcccaacagttgcgcagcctgaatggcgaatggcgatagatccggtggatgaccttttgaatgacctttaatagattatattactaattaattggggaccctagaggtccccttttttattttaaaaattttttcacaaaacggtttacaagcataaagctcggacggatcttttccgctgcataaccctgcttcggggtcattatagcgattttttcggtatatccatcctttttcgcacgatatacaggattttgccaaagggttcgtgtagactttccttggtgtatccaacggcgtcagccgggcaggataggtgaagtaggcccacccgcgagcgggtgttccttcttcactgtcccttattcgcacctggcggtgctcaacgggaatcctgctctgcgaggctggccggctaccgccggcgtaacagatgagggcaagcggatggctgatgaaaccaagccaaccaggaagggcagcccacctatcaaggtgtcgatgcaggggggggggaaagccacgttgtgtctcaaaatctctgatgttacattgcacaagataaaaatatatcatcatgaacaataaaactgtctgcttacataaacagtaatacaaggggtgttatgagccatattcaacgggaaacgtcttgctcaaggccgcgattaaattccaacatggatgctgatttatatgggtataaatgggctcgcgataatgtcgggcaatcaggtgcgacaatctatcgattgtatgggaagcccgatgcgccagagttgtttctgaaacatggcaaaggtagcgttgccaatgatgttacagatgagatggtcagactaaactggctgacggaatttatgcctcttccgaccatcaagcattttatccgtactcctgatgatgcatggttactcaccactgcgatccccggaaaaacagcattccaggtattagaagaatatcctgattcaggtgaaaatattgttgatgcgctggcagtgttcctgcgccggttgcattcgattcctgtttgtaattgtccttttaacagcgatcgcgtatttcgtctcgctcaggcgcaatcacgaatgaataacggtttggttgatgcgagtgattttgatgacgagcgtaatggctggcctgttgaacaagtctggaaagaaatgcataagtttttgccattctcaccggattcagtcgtcactcatggtgatttctcacttgataaccttatttttgacgaggggaaattaataggttgtattgatgttggacgagtcggaatcgcagaccgataccaggatcttgccatcctatggaactgcctcggtgagttttctccttcattacagaaacggctttttcaaaaatatggtattgataatcctgatatgaataaattgcagtttcatttgatgctcgatgagtttttctaatcagaattggttaattggttgtaacactggcagagcattacgctgacttgacgggacggcggctttgttgaataaatcgaacttttgctgagttgaaggatcagatcacgcatcttcccgacaacgcagaccgttccgtggcaaagcaaaagttcaaaatcaccaactggtccacctacaacaaagctctcatcaaccgtggctccctcactttctggctggatgatggggcgattcaggcctggtatgagtcagcaacaccttcttcacgaggcagacctcagacggtatcggatcgatcccccgatgtgtagcagtggcggaccatataggcagatcagaaggcgcggttctcctacatgagcttttcaattcaattcatcattttttttttattcttttttttgatttcggtttccttgaaatttttttgattcggtaatctccgaacagaaggaagaacgaaggaaggagcacagacttagattggtatatatacgcatatgtagtgttgaagaaacatgaaattgcccagtattcttaacccaactgcacagaacaaaaacctgcaggaaacgaagataaatcatgtcgaaagctacatataaggaacgtgctgctactcatcctagtcctgttgctgccaagctatttaatatcatgcacgaaaagcaaacaaacttgtgtgcttcattggatgttcgtaccaccaaggaattactggagttagttgaagcattaggtcccaaaatttgtttactaaaaacacatgtggatatcttgactgatttttccatggagggcacagttaagccgctaaaggcattatccgccaagtacaattttttactcttcgaagacagaaaatttgctgacattggtaatacagtcaaattgcagtactctgcgggtgtatacagaatagcagaatgggcagacattacgaatgcacacggtgtggtgggcccaggtattgttagcggtttgaagcaggcggcagaagaagtaacaaaggaacctagaggccttttgatgttagcagaattgtcatgcaagggctccctatctactggagaatatactaagggtactgttgacattgcgaagagcgacaaagattttgttatcggctttattgctcaaagagacatgggtggaagagatgaaggttacgattggttgattatgacacccggtgtgggtttagatgacaagggagacgcattgggtcaacagtatagaaccgtggatgatgtggtctctacaggatctgacattattattgttggaagaggactatttgcaaagggaagggatgctaaggtagagggtgaacgttacagaaaagcaggctgggaagcatatttgagaagatgcggccagcaaaactaaaaaactgtattataagtaaatgcatgtatactaaactcacaaattagagcttcaatttaattatatcagttattacccgggaatctcggtcgtaatgatttttataatgacgaaaaaaaaaaaattggaaagaaaaagctgggcgcgccggccggcccttttcatcacgtgctataaaaataattataatttaaattttttaatataaatatataaattaaaaatagaaagtaaaaaaagaaattaaagaaaaaatagtttttgttttccgaagatgtaaaagactctagggggatcgccaacaaatactaccttttatcttgctcttcctgctctcaggtattaatgccgaattgtttcatcttgtctgtgtagaagaccacacacgaaaatcctgtgattttacattttacttatcgttaatcgaatgtatatctatttaatctgcttttcttgtctaataaatatatatgtaaagtacgctttttgttgaaattttttaaacctttgtttatttttttttttcttcattccgtaactcttctaccttctttatttactttctaaaatccaaatacaaaacataaaaataaataaacacagagtaaattcccaaattattccatcattaaaagatacgaggcgcgtgtaagttacaggcaagcgatcggccggcccgggcatttaaatgcaggccgcgtacgcgtcgacggtaccgaattcgcttaaacgagctcatgttcgccggtgaacgcgttgaggaagccgggcagtgcctcggcaaaatccttgcgtgtagacaagacatctgcgtagcagttgtcctcaacaacgatgtcgaaatccaaatcggagtgctcatcgagtcctccgtgaacgtaagagccgccgatcagaagagcgcggaagcgaacatcggaagcgaccgcatcgcggatgcggttcaagaaagttgcatgagcttgtggaagtgtgctgagcataaatgattctcctagctgttctttgggtaagtacgccatcaggacgttgtgagtggcgcgatttttagcggctgaaatcagcccttgagcctgtcggcaagtcgcgtcatgaggtccatgcgctcatgcaggatcgccacgaccaacgcgggttcgcccgcacgcggcaggcaaaaaacgtagtggtgttcgcagcgggccatccgcagcgcgggaaagagttcgctcatgtccttaaacgggccttcgccggcggcaagcctggctatgccctgttccagcttagcgatatagcggcgcacctgcgccgcgccccactcccggcgcgtgtagcggatgatgccgcgtagatcggcttcggcctcagccgtgaggatgtaggccgtcaagcgcgatccccgctgagttcttcatcaagaatttcgccgacgctcttggtggacaccttgccggcaagcccatcgttgatgcggttccccagcatggttttcagttcctgccatgcctgatcggcatcagcgtcaccggggaacagacgttcgagggcgtattgcttaatggtcttgccctgcaaggcggccagggctttcaggctctggtgctgctggtccgtcatgtcgattgtcaggcggctcattggataacctccataaaatacacgtaaccacattagcacatatgtgggcgtgaggctacagcgcgaggcgcattaaggtcgggaaaatgcgctaggcgcatttaaattgcgtattgctgtaatgcgccatgccggctagactaggcccaaatgggtatacccaatttgaccaagggggacgcgatgagggcggccaagcactaccgacaacttctatccatcgacttcaacatcgaggcgctggccttcgtgcctggacccgacggcacacgcggccggcgcatccacgtcctggggcgcgaggtccgcgaccggcccggcctggtcgagtacctttcgccggcgttcggctcgcgggtggcgctggacggctactgcaaggccaatttcgatgcagtgctgcacctggcgtaccccgatcatcagcaatggggccacgcatgaagcgccgaagctacgccatgctgcgcgccgctgccgcgctggccgtcctggtcgttgcctcgccggcatgggccgagctgcgcggcgaggtcgtgcgcatcatcgacggcgacaccatcgacgtgctggtagacaagcagccggtgcgcgtgcgcctggtggacattgacgcgccggaaaagcggcaagccttcggcgaacgtgcgcgccaggcgctggccggcatggtgttccgccggcacgtcctggtcgacgagaaggacaccgaccgttacggccgcacgctgggcaccgtgtgggtcaacatggagctggccagccggccgccgcagccgcgcaacgtcaacgccgcgatggttcaccagggcatggcgtgggcctatcgcttccacggccgcgcggccgaccctgaaatgctgcggctcgaacaggaggcgcgaggcaagcgcgtcggcctctggtccgatccgcacgccgtcgagccgtggaaatggcgacgcgagagcaacaaccggagggacgaaggttgaaggtcgcccgcatctacctgcgcgccagtacggacgagcagaatcttgaacgccaggagagccttgtagcggccacgcgggccgccgggtactacgtcgccggcatctaccgcgagaaggcgtccggcgcacgcgccgaccggcccgagctgctgcgcatgatcgcggacctgcaacctggtgaagtcgtcgttgcggagaagatcgaccgcatcagccgcttgccgttggccgaggccgagcgcctggttgcgtcgatccgggccaaaggggccaagctggccgtgcctggcgtggtggacctgtcggagctggccgccgaggcgaacggagtggcgaaaatcgttctggaatccgtccaggacatgcttttgaagctcgccttgcagatggcccgcgacgactacgaggatcggcgcgagcgtcaacgtcagggtgtccagttggcgaaggccgccggccgctacaccggccgcaaacgtgacgccggcatgcacgaccgcatcatcacgcttcgctccggcggatcgagcattgccaagacggccaagctggtcggatgcagcccgagccaggtcaaacgagtgtgggcggcctggaacgcgcagcagcaaaaataaagccgggcagtgcccggcttttctcaccttttcgcgtcccgcagggccgctgcgagcgccctacctagatcctcgctttccccctcggtgtagtccggccagggcacgaagggcgcggatgcgaacctgttgagcaggtacgccttcgggcagcggtagaccaccggcgagttcgccttttcatcccaccgggccaggatcacgtccgcatcgcagtgcatgtccttcacctggtcgcggaagaagccgaaggccaccatgccgctatgttcgccgaggaacgccagttgcttcgcgctggcgatcgcgccgacgccgccggccaaaaccgacgccatcacccagccgacgaaccagaagctggcatgcttgcggttgaccaccgcacgcgcagccgcgaccaggacaacggccaagctgccgaccagggccatgacgaccgtgatccggccgttgtggaaagcgatgggcttgccagcgtccgcttgcacggcgtcgtaaatgctggacccgatgggcgcgcacatcagcacgacaggcagcagcaccaggaacatcgtccgcgtccattgcgcgagtgccttgcggcgttcgccggcggcaagcgcctccatcatcggcgtgaagcccaacagggccaccgcagccgccaagccggcaacgatgccgcaggcgattacatacatacatcctccctaatgcgccttgcgcacggttgtagtcagagtccgcggtggggcgataagctcatgaccaaaatcccttaacgtgagttttcgttccactgagcgtcagaccccgtagaaaagatcaaaggatcttcttgagatcctttttttctgcgggggatcaggaccgctgccggagcgcaacccactcactacagcagagccatgtagacaacatcccctccccctttccaccgcgtcagacgcccgtagcagcccgctacgggctttttcatgccctgccctagcgtccaagcctcacggccgcgctcggcctctctggcggccttctggcgctcctgctgcggcgtccgctcgtgggccgtggcgcgggtccgcgcgccggcctcgtgcgcctggcgctcgcgggcgaggtccagggcggccgtcttcacgttctgccttgcgcagatgagatagatcgatctagcgtggactcaaggctctcgcgaatggctcgcgttggaaactttcattgacacttgaggggcaccgcagggaaattctcgtccttgcgagaaccggctatgtcgtgctgcgcatcgagcctgcgcccttggcttgtctcgcccctctccgcgtcgctacggggcttccagcgcctttccgacgctcaccgggctggttgccctcgccgctgggctggcggccgtctatggccctgcaaacgcgccagaaacgccgtcgaagccgtgtgcgagacaccgcggccgccggcgttgtggatacctcgcggaaaacttggccctcactgacagatgaggggcggacgttgacacttgaggggccgactcacccggcgcggcgttgacagatgaggggcaggctcgatttcggccggcgacgtggagctggccagcctcgcaaatcggcgaaaacgcctgattttacgcgagtttcccacagatgatgtggacaagcctggggataagtgccctgcggtattgacacttgaggggcgcgactactgacagatgaggggcgcgatccttgacacttgaggggcagagtgctgacagatgaggggcgcacctattgacatttgaggggctgtccacaggcagaaaatccagcatttgcaagggtttccgcccgtttttcggccaccgctaacctgtcttttaacctgcttttaaaccaatatttataaaccttgtttttaaccagggctgcgccctgtgcgcgtgaccgcgcacgccgaaggggggtgcccccccttctcgaaccctcccggcccgctaacgcgggcctcccatccccccaggggctgcgcccctcggccgcgaacggcctcaccccaaaaatggcagcgctggcagtccttgccattgccgggatcggggcagtaacgggatgggcgatcagcccgagcgcgacgcccggaagcattgacgtgccgcaggtgctggcatcgacattcagcgaccaggtgccgggcagtgagggcggcggcctgggtggcggcctgcccttcacttcggccgtcggggcattcacggacttcatggcggggccggcaatttttaccttgggcattcttggcatagtggtcgcgggtgccgtgctcgtgttcgggggtgaattaattccccggatcgatccgtcagcttcacgctgccgcaagcactcagggcgcaagggctgctaaaggaagcggaacacgtagaaagccagtccgcagaaacggtgctgaccccggatgaatgtcagctactgggctatctggacaagggaaaacgcaagcgcaaagagaaagcaggtagcttgcagtgggcttacatggcgatagctagactgggcggttttatggacagcaagcgaaccggaattgccagctggggcgccctctggtaaggttgggaagccctgcaaagtaaactggatggctttcttgccgccaaggatctgatggcgcaggggatcaagatcgacggatcgatccggggaattaattccggggcaatcccgcaaggagggtga

SEQ ID NO: 41 - DNA, 29494 bp, Artificial Sequence
  Synthesis optimized sequence E-protein and ORF6 double deletion
caaatataacgaaaggctcagtcgaaagactgggcctttcgttttatctgttgtttgtcgtaatacgactcactatagggattaaaggtttataccttcccaggtaacaaaccaaccaactttcgatctcttgtagatctgttctctaaacgaactttaaaatctgtgtggctgtcactcggctgcatgcttagtgcactcacgcagtataattaataactaattactgtcgttgacaggacacgagtaactcgtctatcttctgcaggctgcttacggtttcgtccgtgttgcagccgatcatcagcacatctaggtttcgtccgggtgtgaccgaaaggtaagatggagagccttgtccctggtttcaacgagaaaacacacgtccaactcagtttgcctgttttacaggttcgcgacgtgttagtacgtggttttggagattcagtggaagaagtcttatcagaggcacgtcaacatcttaaagatggcacttgtggcttagtagaagttgaaaaaggcgttttgcctcaacttgaacagccctatgtgttcatcaaacgttctgatgctagaactgcacctcatggtcatgttatggttgagctggtagcagaattagaaggtattcagtacggtcgtagtggtgagacattaggtgttttagttcctcatgtgggcgaaataccagtggcttaccgcaaagttcttcttagaaagaacggtaataaaggagctggtggccatagttacggcgctgatttaaagtcatttgacttaggcgacgagcttggcactgatccttatgaagatttccaagaaaactggaacactaaacatagcagtggtgttacccgtgaactcatgcgtgagttaaatggaggtgcatacactcgctatgtcgataacaacttctgtggacctgatggttaccctcttgagtgcattaaagaccttctagcacgtgctggtaaagcttcatgcactttgtccgaacaactggactttattgacactaagaggggtgtatactgctgccgtgaacatgagcatgaaattgcttggtacacggaacgttctgaaaagagctatgaattgcagacaccttttgaaattaaactggcaaagaaatttgacaccttcaatggggaatgtccaaattttgtatttcccctcaattccataatcaagactattcaaccaagggttgaaaagaaaaagcttgatggctttatgggtagaattcgatctgtctatccagttgcgtcaccaaatgaatgcaaccaaatgtgcctttcaactctcatgaagtgtgatcattgtggtgaaacttcatggcagacgggcgattttgttaaagccacttgcgaattttgtggcactgagaatttgactaaagaaggtgccactacttgtggttacttaccccaaaatgctgttgttaaaatttactgtccagcatgtcacaattcagaagtaggacctgagcatagtcttgccgaataccataatgaatctggcttgaaaaccattcttcgtaagggtggtcgcactattgcttttggaggatgtgtgttctcttatgttggttgccataacaagtgtgcttattgggttccacgtgcttcagctaacataggttgtaaccatacaggtgttgttggagaaggttccgaaggtcttaatgacaaccttcttgaaatactccaaaaagagaaagtcaacatcaatattgttggtgactttaaacttaatgaagagatcgccattattttggcatctttttctgcttccacaagtgcttttgtggaaactgtgaaaggtttggattataaagcattcaaacagattgttgaatcctgtggtaattttaaggttacaaagggaaaagctaaaaaaggtgcctggaatattggtgaacagaaatcaatactgagtcctctttatgcatttgcatcagaggctgctcgtgttgtacgatcaattttctcccgcactcttgaaactgctcaaaattctgtgcgtgttttacagaaggccgctataacaatactagatggaatttcacagtattcactgagactcattgatgctatgatgttcacatctgatttggctactaacaatctagttgtaatggcctacattacaggtggtgttgttcagttgacttcgcagtggctaactaacatctttggcactgtttatgaaaaactcaaacccgtccttgattggcttgaagagaagtttaaggaaggtgtagagtttcttagagacggttgggagattgttaaattcatctcaacctgtgcttgtgaaattgtcggtggacaaattgtcacctgtgctaaggaaattaaggagagtgttcagacattctttaagcttgtaaacaagtttttggctttgtgtgctgactctatcattattggtggagctaaacttaaagccttgaatttaggtgaaacatttgtcacgcactcaaagggattgtacagaaagtgtgttaaatccagagaagaaactggcctactcatgcctctaaaagccccaaaagaaattatcttcttagagggagaaacacttcccacagaagtgttaacagaggaagttgtcttgaaaactggtgatttacaaccattagaacaacctactagtgaagctgttgaagctccattggttggtacaccagtttgtattaacgggcttatgttgctcgaaatcaaagacacagaaaagtactgtgcccttgcacctaatatgatggtaacaaacaataccttcacactcaaaggcggtgcaccaacaaaggttacttttggtgatgacactgtgatagaagtgcaaggttacaagagtgtgaatatcacttttgaacttgatgaaaggattgataaagtacttaatgagaagtgctctgcctatacagttgaactcggtacagaagtaaatgagttcgcctgtgttgtggcagatgctgtcataaaaactttgcaaccagtatctgaattacttacaccactgggcattgatttagatgagtggagtatggctacatactacttatttgatgagtctggtgagtttaaattggcttcacatatgtattgttctttctaccctccagatgaggatgaagaagaaggtgattgtgaagaagaagagtttgagccatcaactcaatatgagtatggtactgaagatgattaccaaggtaaacctttggaatttggtgccacttctgctgctttacaacctgaagaagaacaagaagaagattggttagatgatgatagtcaacaaactgttggtcaacaagacggcagtgaggacaatcagacaactactattcaaacaattgttgaggttcaacctcaattagagatggaacttacaccagttgttcagactattgaagtgaatagttttagtggttatcttaaacttactgacaatgtatacatcaagaatgcagacattgtggaagaagctaaaaaggtaaaaccaacagtggttgttaatgcagccaatgtttaccttaaacatggaggaggtgttgcaggagccttaaataaggctactaacaatgccatgcaagttgaatctgatgattacatagctactaatggaccacttaaagtgggtggtagttgtgttttaagcggacacaatcttgctaaacactgtttacatgttgtcggcccaaatgttaacaaaggtgaagatattcaacttcttaagagtgcttatgaaaattttaaccagcacgaagttctacttgcaccattattatcagctggtatttttggtgctgaccctatacattctttaagagtttgtgtagatactgttcgcacaaatgtctacttagctgtctttgataaaaatctctatgacaaacttgtttcaagctttttggaaatgaagagtgaaaagcaagttgaacaaaagatcgctgagattcctaaagaggaagttaagccatttataactgaaagtaaaccttcagttgaacagagaaaacaagatgataagaagatcaaagcttgtgttgaagaagttacaacaactctggaagaaactaagttcctcacagaaaacttgctcctttatatcgacattaatggcaatcttcatccagattctgccactcttgttagtgacattgacatcactttcttaaagaaagatgctccatatatagtgggtgatgttgttcaagagggtgttttaactgctgtggttatacctactaaaaaggctggtggcactactgaaatgctagcgaaagctttgagaaaagtgccaacagacaattatataaccacttacccgggtcagggtttaaatggttacactgtagaggaggcaaagacagtgcttaaaaagtgtaaaagtgccttttacattctaccatctattatctctaatgagaagcaagaaattcttggaactgtttcttggaatttgcgagaaatgcttgcacatgcagaagaaacacgcaaattaatgcctgtctgtgtggaaactaaagccatagtttcaactatacagcgtaaatataagggtatcaagatacaagagggtgtggttgattatggtgctagattttacttttacaccagtaaaacaactgtagcgtcacttatcaacacacttaacgatctaaatgaaactcttgttacaatgccacttggctatgtaacacatggcttaaatttggaagaagctgctcggtatatgagatctctcaaagtgccagctacagtttctgtttcttcacctgatgctgttacagcgtataatggttatcttacttcttcttctaaaacacctgaagaacattttattgaaaccatctcacttgctggttcctataaagattggtcctattctggacaatctacacaactaggtatagaatttcttaagagaggtgataaaagtgtatattacacgtccaatcctaccacattccacctagatggtgaagttatcacctttgacaatcttaagacacttctttctttgagagaagtgaggactattaaggtgtttacaacagtagacaacattaacctccacacgcaagttgtggacatgtcaatgacatatggacaacagtttggtccaacttatttggatggagctgatgttactaagataaaacctcataactcacatgaaggtaaaacattttacgttttgcctaatgatgacactctacgtgttgaggcttttgagtactaccacacaactgatcctagttttctgggtaggtacatgtcagcattaaatcacactaaaaagtggaaatacccacaagttaatggtttaacttcgattaaatgggcagataacaactgttatcttgccactgcattgttaacactccaacaaatagagttgaagtttaatccacctgctctacaagatgcttattacagagcaagggctggtgaagctgctaacttttgtgcacttatcttagcctactgtaataagacagtaggtgagttaggtgatgttagagaaacaatgagttacttgtttcaacatgccaatttagattcttgcaaaagagtcttgaacgtggtgtgtaaaacttgtggacaacagcagacaacccttaagggtgtagaagctgttatgtacatgggcacactttcttatgaacaattcaagaaaggtgttcagataccttgtacgtgtggtaaacaagctacaaaatatctagtacaacaggagtcaccttttgttatgatgtcagcaccacctgctcagtatgaacttaagcatggtacatttacttgtgctagtgagtacactggtaattaccagtgtggtcactataagcatataacttctaaggaaactttgtattgcatagacggtgctttacttacaaagtcctcagaatacaaaggtcctattacggatgttttctacaaagaaaacagttacacaacaaccataaaaccagttacttataagttggatggtgttgtttgtacagaaattgaccctaagttggacaattattataagaaggacaactcttatttcacagagcaaccaattgatcttgtaccaaaccaaccatatccaaacgcaagcttcgataattttaagttcgtatgcgataatatcaaatttgctgatgatctcaaccagttaactggttataagaaacctgcttcaagagagcttaaagttacatttttccctgacttaaatggtgatgtggtggctattgattataaacactacacaccctcttttaagaaaggagctaaattgttacataagcctattgtttggcatgttaacaatgcaactaataaagccacgtataaaccaaatacctggtgtatacgttgtctttggagcacaaaaccagttgaaacatcaaattcgtttgatgtactgaagtcagaggacgcgcagggaatggataatcttgcatgtgaagatctaaaaccagtctctgaagaagtagtggaaaatcctaccatacagaaagacgttcttgagtgtaatgtgaaaactaccgaagttgtaggagacattatacttaaaccagcaaataatagtttgaagatcacagaagaggttggccacacagatctaatggctgcttatgtagacaattctagtcttactattaagaaacctaatgaactctctagagtattaggtttgaaaacccttgctactcatggtttagctgctgttaatagtgtcccttgggatactatagctaattatgctaagccttttcttaacaaagttgttagtacaactactaacatagttacacggtgtcttaatcgtgtttgtactaattatatgccttacttctttactttattgctacaattgtgtacttttactagaagtacaaattctagaatcaaggcatctatgccgactactatagcaaagaatactgttaagagtgtcggtaaattttgtctagaggcttcatttaattatctcaagtcacctaacttttctaagctgataaacattatcatctggtttttgctattaagtgtttgcctaggttctttaatctactcaaccgctgctttaggtgttttaatgtctaatttaggcatgccttcttactgtactggttacagagaaggctatttgaactctactaatgtcactattgcaacctactgtactggatctataccttgtagtgtttgtcttagtggtttagattctttagacacctatccttctcttgaaactatacagattaccatttcatctttcaaatgggatttaactgcttttggcttagttgcagagtggtttttggcatatattcttttcactaggtttttctatgtacttggattggctgcaatcatgcaattgtttttcagctattttgcagtccattttattagtaactcttggcttatgtggcttataattaatcttgtgcagatggccccgatttcagctatggttagaatgtacatcttctttgcctcattttattatgtgtggaaaagttatgtgcatgttgtagacggttgtaattcatcaacttgtatgatgtgttacaaacgtaatagagcaacaagagtcgaatgtacaactattgttaatggtgttagaaggtccttttatgtctatgctaatggaggtaaaggcttttgcaaactacacaattggaattgtgttaattgtgatacattctgtgctggtagtacatttattagtgatgaagttgcgagagacttgtcactacagtttaaaagaccaataaatcctactgaccaatcttcttacatcgttgatagtgttacagtgaagaatggttccatccatctttactttgataaagctggtcaaaagacttatgaaagacattctctctctcattttgttaacttagacaacctgagagctaataacactaaaggttcattgcctattaatgttatcgttttcgacggtaaatcaaaatgtgaagaatcatctgcaaaatcagcgtctgtttactacagtcagcttatgtgtcaacctatactgttactagatcaggcattagtgtctgatgttggtgatagtgcggaagttgcagttaaaatgtttgatgcttacgttaatacgttttcatcaacttttaacgtaccaatggaaaaactcaaaacactagttgcaactgcagaagctgaacttgcaaagaatgtgtccttagacaatgtcttatctacgtttatttcagcagctcggcaagggtttgttgattcagatgtagaaactaaagatgttgttgaatgtcttaaattgtcacatcaatctgacatagaagttactggcgatagttgtaataactatatgctcacctataacaaagttgaaaacatgacaccccgtgaccttggtgcttgtattgactgtagtgctagacatattaatgcgcaggtagcaaaaagtcacaacattgctttgatatggaacgttaaagatttcatgtcattgtctgaacaactacgaaaacaaatacgtagtgctgctaaaaagaataacttacccttcaagttgacatgtgcaactactagacaagttgttaatgttgtaacaacaaagatagcacttaagggtggtaaaattgtgaataactggttgaagcagcttattaaagttacacttgtgttcctttttgttgctgctattttctatctgataacacctgttcatgtcatgtctaaacatactgacttttcaagtgaaatcataggatacaaggctattgatggtggtgtcactcgtgacatagcatctacagatacttgttttgctaacaaacatgctgattttgacacatggtttagccagcgtggtggtagttatactaatgacaaagcttgcccattgattgctgcagtcataacaagagaagtgggttttgtcgttcctggtttgcctggaacgatattacgcacaactaatggtgactttttgcatttcttacctagagtttttagtgcagttggtaacatctgttacacaccatcaaaacttatagagtacactgactttgcaacatcagcttgtgttttggctgctgaatgtacaatttttaaagacgcttctggtaagccagtaccatattgttatgataccaatgtactagaaggttctgttgcttatgaaagtttacgccctgacacacgttatgtgctcatggatggctctattattcaatttcctaacacctaccttgaaggttctgtaagagtggtaacaacttttgattctgagtactgtaggcacggcacttgtgaaagatcagaagctggtgtttgtgtatctactagtggtagatgggtacttaacaacgattattacagatctttaccaggagttttctgtggtgtagatgctgtaaatttgcttactaacatgtttacaccactaattcaacctattggtgctttggacatatcagcatctatagtagctggtggtattgtagctatcgtagtaacatgccttgcctactattttatgaggtttagacgtgcttttggtgaatacagtcatgtagttgcctttaatactctcctattccttatgtcattcactgtactctgtttaacaccagtttactcattcttacctggtgtttattctgttatttacctgtacttgacattttatctgactaatgatgtttcttttctcgcacatattcagtggatggttatgttcacacctttagtacctttctggataacaattgcttacatcatttgtatttccacaaagcatttctattggttctttagtaattacctaaagagacgtgtagtctttaatggtgtttcctttagtacttttgaagaagctgcgctgtgcacctttttgttaaataaggagatgtatctaaagttgcgtagtgatgtgctattacctcttacgcaatataatagatacttagctctttataacaagtacaagtatttcagtggagcaatggatacaactagctacagagaagctgcttgttgtcatctcgcaaaggctctcaatgacttcagtaactcaggttctgatgttctttaccaaccaccacaaacctctatcacctcagctgttttgcagagtggttttagaaaaatggcattcccatctggtaaagttgagggttgtatggtacaagtaacttgtggtacaactacacttaacggtctttggcttgatgacgtagtttactgtccaagacatgtgatctgcacctctgaagatatgcttaaccctaattatgaagatctactcatccgtaagtctaatcataacttcttggtacaggctggtaatgttcaactcagggttattggacattctatgcaaaattgtgtacttaagcttaaggttgatacagccaatcctaagacacctaagtataagtttgttcgcattcaaccaggacagactttttcagtgttagcttgttacaatggttcaccatctggtgtttaccaatgtgctatgaggcccaatttcactattaagggttcattccttaatggttcatgtggtagtgttggttttaacatagattatgactgtgtctctttttgttacatgcaccatatggaattaccaactggagttcatgctggcacagacttagaaggtaacttttatggaccttttgttgacaggcaaacagcacaagcagctggtacagatacaactattacagttaatgttcttgcttggttgtacgctgctgttataaatggagacaggtggtttctcaatcgatttaccacaactcttaatgactttaaccttgtggctatgaagtacaattatgaacctctaacacaagaccatgttgacatactaggacctctttctgctcaaactggaattgccgttttagatatgtgtgcttcattaaaagaacttctgcaaaatggtatgaatggacgtaccatattgggtagtgctttattagaagatgagtttacaccttttgatgttgttagacaatgctcaggtgttactttccaaagtgcagtgaaaagaacaatcaagggtacacaccactggttgttactcacaattttgacttcacttttagttttagtccagagtactcaatggtctttgttctttttcttctacgaaaatgcctttttaccttttgctatgggtattattgctatgtctgcttttgcaatgatgtttgtcaaacataagcatgcatttctctgtttgtttttgttaccttctcttgccactgtagcttactttaatatggtctacatgcctgctagttgggtgatgcgtattatgacatggttggatatggttgatactagtttgtctggttttaagctaaaagactgtgttatgtatgcatcagctgtagtgttactaatccttatgacagcaagaactgtgtatgatgatggtgctaggagagtgtggacacttatgaatgtcttgacactcgtttataaagtttactatggcaacgctttagatcaagccatttccatgtgggctcttataatctctgttacttctaactactcaggtgtagttacaactgtcatgtttttggccagaggtattgtttttatgtgtgttgagtattgccctattttcttcataactggtaatacacttcagtgtataatgctagtctattgtttcttaggctatttttgtacttgttacttcggcctcttttgtttactcaaccgctactttagactgactcttggtgtttatgattacttagtgtctacacaggagtttagatatatgaattcacagggactactcccacccaagaatagcatagatgccttcaaactcaacattaaattgttgggtgttggtggcaaaccttgtatcaaagtagccactgtacagtctaaaatgtcagatgtaaagtgcacatcagtagtcttactctcagttttgcaacaactcagagtagaatcatcatctaaattgtgggctcaatgtgtccagttacacaatgacattctcttagctaaagatactactgaagcctttgaaaaaatggtttcactactttctgttttgctttccatgcagggtgctgtagacataaacaagctttgtgaagaaatgctggacaacagggcaaccttacaagctatagcctcagagtttagttcccttccatcatatgcagcttttgctactgctcaagaagcttatgagcaggctgttgctaatggtgattctgaagttgttcttaaaaagttgaagaagtctttgaatgtggctaaatctgaatttgaccgtgatgcagccatgcaacgtaagttggaaaagatggctgatcaagctatgacccaaatgtataaacaggctagatctgaggacaagagggcaaaagttactagtgctatgcagacaatgcttttcactatgcttagaaagttggataatgatgcactcaacaacattatcaacaatgcaagagatggttgtgttcccttgaacataatacctcttacaacagcagccaaactaatggttgtcataccagactacaacacatataagaatacgtgtgatggtacaacatttacttatgcatcagcattgtgggaaatccaacaggttgtagatgcagatagtaaaattgttcagcttagtgaaattagtatggacaattcacctaatttagcatggcctcttattgtaacagctttaagggccaattctgctgtcaaattacagaataatgagcttagtcctgttgcactaagacaaatgtcttgtgctgccggtactacacaaactgcttgcactgatgacaatgcgttagcttactacaacacaacaaagggaggtaggtttgtacttgcactgttatccgatttacaggatttgaaatgggctagattccctaagagtgatggaactggtactatctatacagaactggaaccaccttgtaggtttgttacagacacacctaaaggtcctaaagtgaagtatctttacttcatcaaaggattaaacaacctaaatagaggtatggtacttggtagtttagctgccacagtacgtttacaagctggtaatgcaacagaagttcctgctaattcaactgtactttctttctgtgcttttgctgtagatgctgctaaagcttacaaagattatctagctagtgggggacaaccaatcactaattgtgttaagatgttgtgtacacacactggtactggtcaggcaataacagttacaccggaagccaatatggatcaagaatcctttggtggtgcatcgtgttgtctgtactgccgttgtcatatagatcatccaaatcctaaaggattttgtgacttaaaaggtaagtatgtacaaatacctacaacttgtgctaatgaccctgtgggttttacacttaaaaacacagtctgtaccgtctgcggtatgtggaaaggttatggttgtagttgtgatcaactccgcgaacccatgcttcagtcagctgatgcacaatcgtttttaaacgggtttgcggtgtaagtgcagcccgtcttacaccgtgcggcacaggcactagtactgatgtcgtatatagagcttttgacatctacaatgataaagtagctggttttgctaagttcctaaaaactaattgttgtcgcttccaagaaaaggacgaagatgacaatctcattgattcttactttgtagttaagagacacactttctctaactaccaacatgaagaaacaatttacaacctgcttaaggattgtccagctgttgctaaacatgacttctttaagtttagaatagacggtgacatggtaccacatatatcacgtcaacgtcttactaaatacacaatggcagacctcgtctatgctttaaggcattttgatgaaggtaattgtgacacattaaaagaaatacttgtcacatacaattgttgtgatgatgactacttcaataaaaaggactggtatgattttgtagaaaacccagatatattacgcgtatacgccaacttaggtgaacgtgtacgccaagctttgttaaaaacagtacagttctgtgatgccatgcgaaatgctggtattgttggtgtactgacattagataatcaagatctcaatggtaactggtatgactttggtgatttcatacaaaccacgccaggtagtggagttcctgttgtagactcttattattcattgctcatgcctatattaaccttgaccagggctttaactgcagagtcacatgttgacactgacttaacaaagccttacattaagtgggatttgttaaaatacgacttcacggaagagaggttaaaactctttgaccgttattttaaatactgggatcagacataccacccaaattgtgttaactgtttggatgacagatgcattctgcattgtgcaaactttaatgttctgttctctacagtgttcccacctacaagttttggaccactagtgagaaaaatatttgttgatggtgttccatttgtagtttcaactggataccacttcagagagctaggtgttgtacataatcaggatgtaaacttacatagctctagacttagttttaaggaattacttgtgtatgctgctgatcctgctatgcatgctgcttctggtaatctattactagataaacgcactacgtgcttttcagtagctgcacttactaacaatgttgcttttcaaactgtcaaacccggtaattttaacaaggacttctatgactttgctgtgtctaagggtttctttaaggaaggaagttctgttgaattaaaacacttcttctttgctcaggatggtaatgctgctatcagcgattatgactactatcgttataatctaccaacaatgtgtgatatcagacaactactatttgtagttgaagttgttgataagtactttgattgttacgatggtggctgtattaatgctaaccaagtcatcgtcaacaacctagacaaatcagctggttttccatttaataaatggggtaaggctagactttattatgattccatgagttatgaggatcaagatgcacttttcgcatatacaaaacgtaatgtcatccctactataactcaaatgaaccttaagtatgccattagtgcaaagaatagagctcgcaccgtagctggtgtctctatctgtagtactatgaccaatagacagtttcatcaaaaattactcaagtcaatagccgccactagaggagctactgtagtaattggaacaagcaaattctatggtggttggcacaacatgctcaaaactgtttatagtgatgtagaaaaccctcaccttatgggttgggattatcctaaatgtgatagagccatgcctaacatgcttagaattatggcctcacttgttcttgctcgcaaacatacaacgtgttgtagcttgtcacaccgtttctatagattagctaatgagtgtgctcaagtattgagtgaaatggtcatgtgtggcggttcactatatgttaaaccaggtggaacctcatcaggagatgccacaactgcttatgctaatagtgtgtttaacatttgtcaagctgtcacggccaatgttaatgcacttttatctactgatggtaacaaaattgccgataagtatgtccgcaatttacaacacagactttatgagtgtctctatagaaatagagatgttgacacagactttgtgaatgagttttacgcatatttgcgtaaacatttctcaatgatgatactctctgacgatgctgttgtgtgtttcaatagcacttatgcatctcaaggtctagtggctagcataaagaactttaagtcagttctttactatcaaaacaacgtttttatgtctgaagcaaaatgttggactgagactgaccttactaaaggacctcatgaattttgctctcaacatacaatgctagttaaacagggtgatgattatgtgtaccttccttacccagatccatcaagaatcctaggtgccggttgttttgtagatgatatcgtaaaaacagatggtacacttatgattgaacggttcgtgtctttagctatagatgcttacccacttactaaacatcctaatcaggagtatgctgatgtctttcatttgtacttacaatacatacgtaagctacatgatgagttaacaggacacatgttagacatgtattctgttatgcttactaatgataacacttcaaggtattgggaacctgagttttatgaggctatgtacacaccgcatacagtcttacaagctgttggtgcttgtgttctttgcaattcacagacttcattaagatgtggtgcttgcatacgtagaccattcttatgttgtaaatgctgttacgaccatgtcatctcaacatcacataaattagtcttgtctgttaatccgtatgtttgcaatgctccaggttgtgatgtcacagatgtgactcaactttacttaggaggtatgagctattactgtaagtcacataaaccacccattagttttccattgtgtgctaatggacaagtttttggtctctacaagaatacatgtgttggtagcgataatgttactgactttaatgcaattgcaacatgtgactggacaaatgctggtgattacattttagctaacacctgtactgaaagactcaagctttttgcagcagaaacgctcaaagctactgaggagacatttaaactgtcttatggtattgctactgtacgtgaagtgctgtctgacagagaattacatctttcatgggaagttggtaaacctagaccaccacttaaccgaaattatgtctttactggttatcgtgtaactaaaaacagtaaagtgcaaatcggagagtacacctttgaaaaaggtgactatggtgatgctgttgtttaccgaggtacaacaacttacaaactcaacgttggtgattattttgtgctgacatcacatacagtaatgccattaagtgcacctacactagtgccacaagagcactatgttagaattactggcttatacccaacactcaatatctcagatgagttttctagcaatgttgcaaattatcaaaaggttggtatgcaaaagtattctacactccagggaccacctggtactggtaaaagtcattttgctattggtctagctctctactacccttctgctcgcatagtatatacagcttgctctcatgcagctgttgatgcactatgtgagaaggcattaaaatatttgcccatagacaaatgtagtagaattatacctgcacgtgctcgtgtagagtgttttgataaattcaaggtgaattcaacattagaacagtatgtcttttgtactgtaaatgcattgcctgagacgacagcagatatagttgtctttgatgaaatttcaatggccacaaattatgatttgagtgttgtcaatgccagattacgtgctaagcactatgtgtacattggtgatcctgctcaattacctgcaccacgcacattactaactaagggtacactagaaccagaatatttcaattcagtgtgtagacttatgaaaactataggtccagacatgttcctcggaacttgtcgtagatgtcctgctgaaattgttgacactgtgagtgctttggtttatgataataagcttaaggcacataaagacaaatcagctcaatgctttaaaatgttctacaagggtgttatcacgcatgatgtttcatctgcaattaacaggccacaaataggcgtggtaagagaattccttacacgtaaccctgcttggagaaaagctgtctttatttcaccttacaattcccagaatgctgtagcctcaaagattttgggactaccaactcaaactgttgattcatcacagggctcagaatatgactatgtcatattcactcaaaccactgaaacagctcactcttgtaatgtaaacagattcaacgttgctattaccagagcaaaagtaggcatactttgcataatgtctgatagagacctttatgacaagttgcaatttacaagtcttgaaattccacgtaggaatgtggcaactttacaagctgaaaatgtaacaggactctttaaagattgtagtaaggtaatcactgggttacatcctacacaggcacctacacacttaagtgttgatactaaattcaaaactgaaggtttatgtgttgacatacctggcatacctaaggacatgacctatagaagattaatctctatgatgggtttcaaaatgaattaccaggttaatggttaccctaacatgtttatcacccgcgaagaagctataagacatgtacgtgcatggattggcttcgatgtcgaaggttgtcatgctactagagaagctgttggtaccaatttacctttacagctaggtttttctacaggtgttaacctagttgctgtacctacaggttatgttgatacacctaataatacagatttttccagagttagtgctaaaccaccgcctggagatcaatttaaacacctcataccacttatgtacaaaggacttccttggaatgtagtgcgtataaagattgtccaaatgttaagtgacacacttaaaaatctctctgacagagtcgtatttgtcttatgggcacatggctttgagttgacatctatgaagtattttgtgaagatcggacctgagcgcacatgttgtctatgtgatagacgtgctacatgcttttccactgcttcagacacttatgcctgttggcatcattctattggatttgattacgtctataatccgtttatgattgatgttcaacaatggggttttacaggtaacctacaaagcaaccatgatctgtattgtcaagtccatggtaatgcacatgtagctagttgtgatgcaatcatgactaggtgtctagctgtccacgagtgctttgttaagcgtgttgactggactattgaatatcctataatcggtgatgaactgaagattaatgcggcttgtagaaaggttcaacacatggttgttaaagctgcattattagcagacaaattcccagttcttcacgacattggtaaccctaaagctattaagtgtgtacctcaagctgatgtagaatggaagttctatgatgcacagccttgtagtgacaaagcttacaaaatagaagaactgttctattcttatgccacacattctgacaaattcacagatggtgtatgcctattttggaattgcaatgtcgatagatatcctgctaattccattgtttgtagatttgacactagagtgctatctaaccttaacttgcctggttgtgatggtggcagtttgtatgtaaataagcatgcattccacacaccagcttttgataaaagtgcttttgttaatctaaagcaacttccatttttctattactctgacagtccatgtgagtctcatggaaaacaagtagtgtcagatatagattatgtaccactaaagtctgctacgtgtataacacgttgcaatttaggtggtgctgtctgtagacatcatgctaatgagtacagattgtatctcgatgcttataacatgatgatctcagctggctttagcttgtgggtttacaaacaatttgatacctataacctctggaacacttttacaagacttcagagtttagaaaatgtggcttttaatgttgtaaataagggacactttgatggacaacagggtgaagtaccagtttctatcattaacaacactgtttacacaaaagttgatggtgttgatgtagaattgtttgagaacaaaaccacattacctgttaatgtagcatttgagctttgggctaagcgcaacattaaaccagtaccagaggtgaaaatactcaataatttgggtgtggacattgctgctaatactgtgatctgggactacaaaagagatgctccagcacatatatctactattggtgtttgttctatgactgacatagccaagaaaccaactgaaacgatttgtgcaccactcactgtcttttttgatggtagagttgatggtcaagtagacttatttagaaatgcccgtaatggtgttcttattacagaaggtagtgttaaaggtttacaaccatctgtaggtcccaaacaagctagtcttaatggagtcacattaattggagaagccgtaaaaacacagttcaattattacaagaaagtggatggtgttgtccaacaattacctgaaacttactttactcagagtagaaacttacaggaatttaagcccaggagtcaaatggaaattgatttcttagaacttgctatggatgaattcattgaacggtataaattagaaggctatgccttcgaacatatcgtttatggagattttagtcatagtcagttaggtggtttacatctactgattggactagctaaacgttttaaggaatcaccttttgaacttgaagattttattcctatggacagtacagttaaaaactacttcataacagatgcgcaaacaggttcatctaagtgtgtgtgttctgttattgatcttttacttgatgacttcgttgaaataataaagtcccaagatttatctgtagtttctaaggttgtcaaagtgactattgactatacagaaatctcatttatgctttggtgtaaagatggccatgtagaaacattttacccaaaattacaatctagtcaagcgtggcaaccgggtgttgctatgcctaatctttacaaaatgcaaagaatgctattagaaaagtgtgaccttcaaaattatggtgatagtgcaacattacctaaaggcataatgatgaatgtcgcaaaatatactcaactgtgtcaatatttaaacacactgacattagctgtaccctataatatgagagttatccattttggtgctggttctgataaaggagttgcaccaggtacagctgttttaagacaatggttgcctacaggtacgctgcttgtcgattcagatcttaatgactttgtctctgatgcagattcaactttgattggtgattgtgcaactgtacatacagctaataaatgggatctcattattagtgatatgtacgaccctaagactaagaatgtcacaaaagaaaacgactctaaagagggttttttcacttacatttgtgggtttatacaacaaaagctagctcttggaggttccgtggctataaagataacagaacattcttggaatgctgatctttataagctcatgggacacttcgcatggtggacagcctttgttactaatgtgaatgcgtcatcatctgaagcatttttaatcggatgtaactaccttggcaaaccacgcgaacaaatagatggttatgtcatgcatgcaaattacatattttggaggaatacaaatccaattcagctttcttcttattctttattcgacatgagtaaattcccccttaaattaaggggtactgctgttatgtctttaaaagaaggtcaaatcaatgatatgattctctctcttcttagtaaaggtagacttataattagagaaaacaacagagttgttatttctagtgatgttcttgttaacaactaaacgaacaatgtttgtttttcttgttttattgccactagtctctagtcagtgtgttaatcttacaaccagaactcaattaccccctgcatacactaattctttcacacgtggtgtttattaccctgacaaagttttcagatcctcagttttacattcaactcaggacttgttcttacctttcttttccaatgttacttggttccatgctatacatgtctctgggaccaatggtactaagaggtttgataaccctgtcctaccatttaatgatggtgtttactttgcttccactgagaagtctaacataataagaggctggatttttggtactactttagattcgaaaacccagtccctacttattgttaataacgctactaatgttgttatcaaagtctgtgaatttcaattttgtaacgatccatttttgggtgtttattaccacaaaaacaacaaaagttggatggaaagtgagttcagagtttattctagtgcgaataattgcacttttgaatacgtctctcagccttttcttatggaccttgaaggaaaacagggtaatttcaaaaatcttagggaatttgtgttcaagaatattgatggttacttcaagatatactctaagcacacgcctattaatttagtgcgtgatctccctcagggtttttcggctttagaaccattggtagatttgccaataggtattaacatcactaggtttcaaactttacttgctttacatagaagttatttaactcctggtgattcttcttcaggttggacagctggtgctgcagcttattatgtgggttatcttcaacctaggacttttctactgaagtacaatgaaaatggaaccattacagatgctgtagactgtgcacttgaccctctctcagaaacaaagtgtacgttgaaatccttcactgtagaaaaaggaatctatcaaacttctaactttagagtccaaccaacagaatctattgttagatttcctaacatcacaaacttgtgcccttttggtgaagtttttaacgccaccagatttgcatctgtttatgcttggaacaggaagagaatcagcaactgtgttgctgattattctgtcctgtataattccgcatcattttccacttttaagtgttatggagtgtctcctactaaattaaatgatctctgctttactaatgtctatgcagattcatttgtaattagaggtgatgaagtcagacaaatcgctccagggcaaactggaaagattgctgattataactacaaattaccagatgattttacaggctgcgttatagcttggaattctaacaatcttgattctaaggttggtggtaattataattacctgtacagattgtttaggaagtctaatctcaaaccttttgagagagatatttcaactgaaatctatcaggccggtagcacaccttgtaatggtgttgaaggttttaattgttactttcctctgcaatcatatggtttccaacccactaatggtgttggttaccaaccatacagagtagtagtactttcttttgaacttctacatgcaccagcaactgtttgtggacctaaaaagtctactaatttggttaagaacaagtgtgtcaatttcaacttcaatggtttaacaggcacaggtgttcttactgagtctaacaaaaagtttctgcctttccaacaatttggcagagacattgctgacactactgatgctgttcgtgatccacaaacacttgagattcttgacattacaccatgttcttttggtggtgtcagtgttataacaccaggaacaaatacttctaaccaggttgctgttctttatcaggatgttaactgcacagaagtccctgttgctattcatgcagatcaacttactcctacttggcgtgtttattctacaggttctaatgtttttcaaacacgtgcaggctgtttaataggggctgaacatgtcaacaactcatatgagtgtgacatacccattggtgcaggtatatgcgctagttatcagactcagactaattctcctcggagagcaagaagtgtagctagtcaatccatcattgcctacactatgtcacttggtgcagaaaattcagttgcttactctaataactctattgccatacccacaaattttactattagcgttaccacagaaattctaccagtgtctatgaccaagacatcagtagattgtacaatgtacatttgtggtgattcaactgaatgcagcaatcttttgttgcaatatggcagtttttgtacacaattaaaccgtgctttaactggaatagctgttgaacaagacaaaaacacccaagaagtttttgcacaagtcaaacaaatttacaagacaccaccaattaaagattttggcggttttaattttagccagatactgccagatccatcaaaaccaagcaagaggtcatttattgaagatctactgttcaacaaagtgacacttgcagatgctggcttcatcaaacaatatggtgattgccttggtgatattgctgctagagacctcatttgtgcacaaaagtttaacggccttactgttttgccacctttgctcacagatgaaatgattgctcaatacacttctgcactgttagcaggtacaatcacttctggttggacttttggtgcaggtgctgcattacaaataccatttgctatgcaaatggcttataggtttaatggtattggagttacacagaatgttctctatgagaaccaaaaattgattgccaaccaatttaatagtgctattggcaaaattcaagactcactttcttccacagcaagtgcacttggaaaacttcaagatgtggtcaaccaaaatgcacaagctttaaacacgcttgttaaacaacttagctccaattttggtgcaatttcaagtgttttaaacgacatcctttcacgtcttgacaaagttgaggctgaagtgcaaattgataggttgatcacaggcagacttcaaagtttgcagacatatgtgactcaacaattaattagagctgcagaaatcagagcttctgctaatcttgctgctactaaaatgtcagagtgtgtacttggacaatcaaaaagagttgacttttgcggaaagggctatcatcttatgtcatttcctcagtcagcacctcatggtgtcgtctttttgcatgtgacttatgtccctgcacaagaaaagaacttcacaactgctcctgccatttgtcatgatggaaaagcacactttcctcgtgaaggtgtctttgtttcaaatggcacacactggtttgtaacacaaaggaatttttatgaaccacaaatcattactacagacaacacatttgtgtctggtaactgtgatgttgtaataggaattgtcaacaacacagtttatgatcctttgcaacctgaattagactcattcaaggaggagcttgataaatacttcaagaaccatacctcaccagatgttgatttaggtgacatctctggcattaatgcttcagttgtaaacattcagaaagaaatcgaccgcctcaatgaggttgccaagaatttaaatgaatctctcatcgatctccaagaacttggaaagtatgagcagtatataaaatggccatggtacatttggctaggttttatagctggcttgattgccatagtaatggtgacaattatgctttgctgtatgaccagttgctgtagttgtctcaagggctgttgttcttgtggatcctgctgcaaatttgacgaggacgactctgagccagtgctcaaaggagtcaaattacattacacataaacgaacttatggatttgtttatgagaatcttcacaattggaactgtaactttgaagcaaggtgaaatcaaggatgctactccttcagattttgttagagctactgcaacgataccgatacaagcatcacttcctttcggatggcttattgttggcgttgcacttcttgctgtttttcagagcgcttccaaaatcataaccctcaaaaagagatggcaactagcactctccaagggtgttcactttgtttgcaacttgctgttgttgtttgtaacagtttactcacatcttttgcttgttgctgctggccttgaagccccttttctctatctttatgctttagtctacttcttgcagagtataaactttgtacgcataataatgaggctttggctttgctggaaatgccgttccaaaaacccattactttatgatgccaactattttctttgctggcatactaattgttacgactattgtataccttacaatagtgtaacttcttcaattgtcattacttcaggtgatggcacaacaagtcctatttctgaacatgactaccagattggtggttatactgaaaaatgggaatctggagtaaaagactgtgttgtattacacagttacttcacttcagactattaccagctgtactcaactcaattgagtacagacactggtgttgaacatgttaccttcttcatctacaataaaatcgttgatgagcctgaagaacatgtccaaattcacacaatcgacgtttcatccggagttgttaatccagtaatggaaccaatttatgatgaaccgacgacgactactagcgtgcctttgtaagcacaagctgatgagtacgaacttatggcagattccaacggtactattaccgttgaggagctgaaaaagctccttgaacaatggaacctagtaataggtttcctattccttacatggatttgcctgctgcaatttgcctatgccaacaggaataggtttttgtacatcattaagttgattttcctctggctgttatggccagtaactttagcttgttttgtgcttgctgctgtttacagaataaattggatcaccggtggaattgctattgcaatggcttgtcttgtaggattgatgtggctaagctacttcattgcttctttcagactgtttgcgcgtacgcgttccatgtggtcattcaatccagaaactaacattcttctcaacgtgccactccatggaactattctgactagaccgcttctagaaagtgaactcgtaatcggagctgttatccttcgtggacatcttcgtattgctggacatcatctaggacgctgtgacatcaaggatctacctaaagaaatcactgttgctacatcacgaacgctttcttattacaaattgggagcttcacagcgtgtagcaggtgattcaggttttgctgcatatagtcgctacaggattggcaactataaattaaacacagaccattccagtagcagtgacaatattgctttgcttgtacagtaaacgaacatgaaaattattcttttcttggcactgataacactcgctacttgtgagctttatcactaccaagagtgtgttagaggtacaacagtacttttaaaagaaccttgctcgtcgggaacatacgagggcaattcaccatttcatcctctagctgataacaaatttgcactgacttgctttagcactcaatttgcttttgcttgtcctgacggcgtaaaacacgtctatcagttacgtgccagatcagtttcacctaaactgttcatcagacaagaggaagttcaagaactttactctccaatttttcttattgttgcggcaatagtgtttataacactttgcttcacactcaaaagaaagacagaatgattgaactttcattaattgacttctatttgtgctttttagcctttctgctattccttgttttaattatgcttattatcttttggttctcacttgaactgcaagatcataatgaaacttgtcacgcctaaacgaacatgaaatttcttgttttcttaggaatcatcacaactgtagctgcatttcaccaagaatgtagtttacagtcatgtactcaacatcaaccatatgtagttgatgacccgtgtcctattcacttctattctaaatggtatatcagagtaggagctagaaaatcagcacctttaattgaattgtgcgtggatgaggctggttctaaatcacccattcagtacatcgatatcggtaattatacagtttcctgtttaccttttacaattaactgccaggaacctaaattgggtagtcttgtagtgcgttgttcgttctacgaggactttttagagtatcatgacgttcgtgttgttttagatttcatctaaacgaacaaactaaaatgtctgataatggacctcaaaatcagcgaaatgcacctcgcattacgtttggtggaccatcagattcaactggcagtaaccagaatggagaacgaagtggtgcgcgatcaaaacaacgccgcccgcaaggtttacccaataatactgcgtcttggttcaccgctctcactcaacatggcaaggaagatttaaaattccctcgaggacaaggcgttccaattaacaccaatagcagtccagatgaccaaattggctactaccgccgcgccacaagacgaattcgtggtggtgatggtaaaatgaaagatctcagtccaagatggtatttctactatctaggaactgggccagaagctggacttccttatggtgctaacaaagatggcatcatatgggttgcaactgagggagccttgaatacaccaaaagatcacattggcaccagaaatcctgctaacaatgctgcaatcgtgctacaacttcctcaaggaacaacattaccaaaaggtttttacgcagaagggtctagaggtggaagtcaagcctcttctagatcatcatcacgtagtcgcaacagttcaagaaattcaactccaggttcaagtagaggaacttctcctgctagaatggctggaaatggaggtgatgctgctcttgctttgttactacttgacagattgaaccagcttgagagcaaaatgtctggtaaaggccaacaacaacaaggccaaactgtcactaagaaatctgctgctgaggcttctaagaagcctagacaaaaacgtactgccactaaagcatacaatgtaacacaagctttcggcagacgtggtccagaacaaactcaaggaaattttggggatcaggaactaatcagacaaggaactgattacaaacattggccgcaaattgcacaatttgctccttctgcttcagcgttctttggaatgtcgagaattggaatggaagtcacaccttcgggaacatggttgacctatacaggtgccatcaaattggatgacaaagatccaaatttcaaagatcaagtcattttgctgaataagcatattgacgcatacaaaacattcccaccaacagagcctaaaaaggacaaaaagaagaaggctgatgaaactcaagccttaccgcagagacagaagaaacagcaaactgtgactcttcttcctgctgcagatttggatgatttctccaaacaattgcaacaatccatgagcagtgctgactcaactcaggcctaaactcatgcagaccacacaaggcagatgggctatataaacgttttcgcttttccgtttacgatatatagtctactcttgtgcagaatgaattctcgtaactacatagcacaagtagatgtagttaactttaatctcacatagcaatctttaatcagtgtgtaacattagggaggacttgaaagagccaccacattttcaccgaggccacgcggagtacgatcgagtgtacagtgaacaatgctagggagagctgcctatatggaagagccctaatgtgtaaaattaattttagtagtgctatccccatgtgattttaatagcttcttaggagaatgacaaaaaaaaacaaaaaaaa

SEQ ID NO: 42 - DNA, 29348 bp, Artificial Sequence
  Synthesis optimized sequence E-protein and ORF8 double deletion
caaatataacgaaaggctcagtcgaaagactgggcctttcgttttatctgttgtttgtcgtaatacgactcactatagggattaaaggtttataccttcccaggtaacaaaccaaccaactttcgatctcttgtagatctgttctctaaacgaactttaaaatctgtgtggctgtcactcggctgcatgcttagtgcactcacgcagtataattaataactaattactgtcgttgacaggacacgagtaactcgtctatcttctgcaggctgcttacggtttcgtccgtgttgcagccgatcatcagcacatctaggtttcgtccgggtgtgaccgaaaggtaagatggagagccttgtccctggtttcaacgagaaaacacacgtccaactcagtttgcctgttttacaggttcgcgacgtgttagtacgtggttttggagattcagtggaagaagtcttatcagaggcacgtcaacatcttaaagatggcacttgtggcttagtagaagttgaaaaaggcgttttgcctcaacttgaacagccctatgtgttcatcaaacgttctgatgctagaactgcacctcatggtcatgttatggttgagctggtagcagaattagaaggtattcagtacggtcgtagtggtgagacattaggtgttttagttcctcatgtgggcgaaataccagtggcttaccgcaaagttcttcttagaaagaacggtaataaaggagctggtggccatagttacggcgctgatttaaagtcatttgacttaggcgacgagcttggcactgatccttatgaagatttccaagaaaactggaacactaaacatagcagtggtgttacccgtgaactcatgcgtgagttaaatggaggtgcatacactcgctatgtcgataacaacttctgtggacctgatggttaccctcttgagtgcattaaagaccttctagcacgtgctggtaaagcttcatgcactttgtccgaacaactggactttattgacactaagaggggtgtatactgctgccgtgaacatgagcatgaaattgcttggtacacggaacgttctgaaaagagctatgaattgcagacaccttttgaaattaaactggcaaagaaatttgacaccttcaatggggaatgtccaaattttgtatttcccctcaattccataatcaagactattcaaccaagggttgaaaagaaaaagcttgatggctttatgggtagaattcgatctgtctatccagttgcgtcaccaaatgaatgcaaccaaatgtgcctttcaactctcatgaagtgtgatcattgtggtgaaacttcatggcagacgggcgattttgttaaagccacttgcgaattttgtggcactgagaatttgactaaagaaggtgccactacttgtggttacttaccccaaaatgctgttgttaaaatttactgtccagcatgtcacaattcagaagtaggacctgagcatagtcttgccgaataccataatgaatctggcttgaaaaccattcttcgtaagggtggtcgcactattgcttttggaggatgtgtgttctcttatgttggttgccataacaagtgtgcttattgggttccacgtgcttcagctaacataggttgtaaccatacaggtgttgttggagaaggttccgaaggtcttaatgacaaccttcttgaaatactccaaaaagagaaagtcaacatcaatattgttggtgactttaaacttaatgaagagatcgccattattttggcatctttttctgcttccacaagtgcttttgtggaaactgtgaaaggtttggattataaagcattcaaacagattgttgaatcctgtggtaattttaaggttacaaagggaaaagctaaaaaaggtgcctggaatattggtgaacagaaatcaatactgagtcctctttatgcatttgcatcagaggctgctcgtgttgtacgatcaattttctcccgcactcttgaaactgctcaaaattctgtgcgtgttttacagaaggccgctataacaatactagatggaatttcacagtattcactgagactcattgatgctatgatgttcacatctgatttggctactaacaatctagttgtaatggcctacattacaggtggtgttgttcagttgacttcgcagtggctaactaacatctttggcactgtttatgaaaaactcaaacccgtccttgattggcttgaagagaagtttaaggaaggtgtagagtttcttagagacggttgggagattgttaaattcatctcaacctgtgcttgtgaaattgtcggtggacaaattgtcacctgtgctaaggaaattaaggagagtgttcagacattctttaagcttgtaaacaagtttttggctttgtgtgctgactctatcattattggtggagctaaacttaaagccttgaatttaggtgaaacatttgtcacgcactcaaagggattgtacagaaagtgtgttaaatccagagaagaaactggcctactcatgcctctaaaagccccaaaagaaattatcttcttagagggagaaacacttcccacagaagtgttaacagaggaagttgtcttgaaaactggtgatttacaaccattagaacaacctactagtgaagctgttgaagctccattggttggtacaccagtttgtattaacgggcttatgttgctcgaaatcaaagacacagaaaagtactgtgcccttgcacctaatatgatggtaacaaacaataccttcacactcaaaggcggtgcaccaacaaaggttacttttggtgatgacactgtgatagaagtgcaaggttacaagagtgtgaatatcacttttgaacttgatgaaaggattgataaagtacttaatgagaagtgctctgcctatacagttgaactcggtacagaagtaaatgagttcgcctgtgttgtggcagatgctgtcataaaaactttgcaaccagtatctgaattacttacaccactgggcattgatttagatgagtggagtatggctacatactacttatttgatgagtctggtgagtttaaattggcttcacatatgtattgttctttctaccctccagatgaggatgaagaagaaggtgattgtgaagaagaagagtttgagccatcaactcaatatgagtatggtactgaagatgattaccaaggtaaacctttggaatttggtgccacttctgctgctttacaacctgaagaagaacaagaagaagattggttagatgatgatagtcaacaaactgttggtcaacaagacggcagtgaggacaatcagacaactactattcaaacaattgttgaggttcaacctcaattagagatggaacttacaccagttgttcagactattgaagtgaatagttttagtggttatcttaaacttactgacaatgtatacatcaagaatgcagacattgtggaagaagctaaaaaggtaaaaccaacagtggttgttaatgcagccaatgtttaccttaaacatggaggaggtgttgcaggagccttaaataaggctactaacaatgccatgcaagttgaatctgatgattacatagctactaatggaccacttaaagtgggtggtagttgtgttttaagcggacacaatcttgctaaacactgtttacatgttgtcggcccaaatgttaacaaaggtgaagatattcaacttcttaagagtgcttatgaaaattttaaccagcacgaagttctacttgcaccattattatcagctggtatttttggtgctgaccctatacattctttaagagtttgtgtagatactgttcgcacaaatgtctacttagctgtctttgataaaaatctctatgacaaacttgtttcaagctttttggaaatgaagagtgaaaagcaagttgaacaaaagatcgctgagattcctaaagaggaagttaagccatttataactgaaagtaaaccttcagttgaacagagaaaacaagatgataagaagatcaaagcttgtgttgaagaagttacaacaactctggaagaaactaagttcctcacagaaaacttgctcctttatatcgacattaatggcaatcttcatccagattctgccactcttgttagtgacattgacatcactttcttaaagaaagatgctccatatatagtgggtgatgttgttcaagagggtgttttaactgctgtggttatacctactaaaaaggctggtggcactactgaaatgctagcgaaagctttgagaaaagtgccaacagacaattatataaccacttacccgggtcagggtttaaatggttacactgtagaggaggcaaagacagtgcttaaaaagtgtaaaagtgccttttacattctaccatctattatctctaatgagaagcaagaaattcttggaactgtttcttggaatttgcgagaaatgcttgcacatgcagaagaaacacgcaaattaatgcctgtctgtgtggaaactaaagccatagtttcaactatacagcgtaaatataagggtatcaagatacaagagggtgtggttgattatggtgctagattttacttttacaccagtaaaacaactgtagcgtcacttatcaacacacttaacgatctaaatgaaactcttgttacaatgccacttggctatgtaacacatggcttaaatttggaagaagctgctcggtatatgagatctctcaaagtgccagctacagtttctgtttcttcacctgatgctgttacagcgtataatggttatcttacttcttcttctaaaacacctgaagaacattttattgaaaccatctcacttgctggttcctataaagattggtcctattctggacaatctacacaactaggtatagaatttcttaagagaggtgataaaagtgtatattacacgtccaatcctaccacattccacctagatggtgaagttatcacctttgacaatcttaagacacttctttctttgagagaagtgaggactattaaggtgtttacaacagtagacaacattaacctccacacgcaagttgtggacatgtcaatgacatatggacaacagtttggtccaacttatttggatggagctgatgttactaagataaaacctcataactcacatgaaggtaaaacattttacgttttgcctaatgatgacactctacgtgttgaggcttttgagtactaccacacaactgatcctagttttctgggtaggtacatgtcagcattaaatcacactaaaaagtggaaatacccacaagttaatggtttaacttcgattaaatgggcagataacaactgttatcttgccactgcattgttaacactccaacaaatagagttgaagtttaatccacctgctctacaagatgcttattacagagcaagggctggtgaagctgctaacttttgtgcacttatcttagcctactgtaataagacagtaggtgagttaggtgatgttagagaaacaatgagttacttgtttcaacatgccaatttagattcttgcaaaagagtcttgaacgtggtgtgtaaaacttgtggacaacagcagacaacccttaagggtgtagaagctgttatgtacatgggcacactttcttatgaacaattcaagaaaggtgttcagataccttgtacgtgtggtaaacaagctacaaaatatctagtacaacaggagtcaccttttgttatgatgtcagcaccacctgctcagtatgaacttaagcatggtacatttacttgtgctagtgagtacactggtaattaccagtgtggtcactataagcatataacttctaaggaaactttgtattgcatagacggtgctttacttacaaagtcctcagaatacaaaggtcctattacggatgttttctacaaagaaaacagttacacaacaaccataaaaccagttacttataagttggatggtgttgtttgtacagaaattgaccctaagttggacaattattataagaaggacaactcttatttcacagagcaaccaattgatcttgtaccaaaccaaccatatccaaacgcaagcttcgataattttaagttcgtatgcgataatatcaaatttgctgatgatctcaaccagttaactggttataagaaacctgcttcaagagagcttaaagttacatttttccctgacttaaatggtgatgtggtggctattgattataaacactacacaccctcttttaagaaaggagctaaattgttacataagcctattgtttggcatgttaacaatgcaactaataaagccacgtataaaccaaatacctggtgtatacgttgtctttggagcacaaaaccagttgaaacatcaaattcgtttgatgtactgaagtcagaggacgcgcagggaatggataatcttgcatgtgaagatctaaaaccagtctctgaagaagtagtggaaaatcctaccatacagaaagacgttcttgagtgtaatgtgaaaactaccgaagttgtaggagacattatacttaaaccagcaaataatagtttgaagatcacagaagaggttggccacacagatctaatggctgcttatgtagacaattctagtcttactattaagaaacctaatgaactctctagagtattaggtttgaaaacccttgctactcatggtttagctgctgttaatagtgtcccttgggatactatagctaattatgctaagccttttcttaacaaagttgttagtacaactactaacatagttacacggtgtcttaatcgtgtttgtactaattatatgccttacttctttactttattgctacaattgtgtacttttactagaagtacaaattctagaatcaaggcatctatgccgactactatagcaaagaatactgttaagagtgtcggtaaattttgtctagaggcttcatttaattatctcaagtcacctaacttttctaagctgataaacattatcatctggtttttgctattaagtgtttgcctaggttctttaatctactcaaccgctgctttaggtgttttaatgtctaatttaggcatgccttcttactgtactggttacagagaaggctatttgaactctactaatgtcactattgcaacctactgtactggatctataccttgtagtgtttgtcttagtggtttagattctttagacacctatccttctcttgaaactatacagattaccatttcatctttcaaatgggatttaactgcttttggcttagttgcagagtggtttttggcatatattcttttcactaggtttttctatgtacttggattggctgcaatcatgcaattgtttttcagctattttgcagtccattttattagtaactcttggcttatgtggcttataattaatcttgtgcagatggccccgatttcagctatggttagaatgtacatcttctttgcctcattttattatgtgtggaaaagttatgtgcatgttgtagacggttgtaattcatcaacttgtatgatgtgttacaaacgtaatagagcaacaagagtcgaatgtacaactattgttaatggtgttagaaggtccttttatgtctatgctaatggaggtaaaggcttttgcaaactacacaattggaattgtgttaattgtgatacattctgtgctggtagtacatttattagtgatgaagttgcgagagacttgtcactacagtttaaaagaccaataaatcctactgaccaatcttcttacatcgttgatagtgttacagtgaagaatggttccatccatctttactttgataaagctggtcaaaagacttatgaaagacattctctctctcattttgttaacttagacaacctgagagctaataacactaaaggttcattgcctattaatgttatcgttttcgacggtaaatcaaaatgtgaagaatcatctgcaaaatcagcgtctgtttactacagtcagcttatgtgtcaacctatactgttactagatcaggcattagtgtctgatgttggtgatagtgcggaagttgcagttaaaatgtttgatgcttacgttaatacgttttcatcaacttttaacgtaccaatggaaaaactcaaaacactagttgcaactgcagaagctgaacttgcaaagaatgtgtccttagacaatgtcttatctacgtttatttcagcagctcggcaagggtttgttgattcagatgtagaaactaaagatgttgttgaatgtcttaaattgtcacatcaatctgacatagaagttactggcgatagttgtaataactatatgctcacctataacaaagttgaaaacatgacaccccgtgaccttggtgcttgtattgactgtagtgctagacatattaatgcgcaggtagcaaaaagtcacaacattgctttgatatggaacgttaaagatttcatgtcattgtctgaacaactacgaaaacaaatacgtagtgctgctaaaaagaataacttacccttcaagttgacatgtgcaactactagacaagttgttaatgttgtaacaacaaagatagcacttaagggtggtaaaattgtgaataactggttgaagcagcttattaaagttacacttgtgttcctttttgttgctgctattttctatctgataacacctgttcatgtcatgtctaaacatactgacttttcaagtgaaatcataggatacaaggctattgatggtggtgtcactcgtgacatagcatctacagatacttgttttgctaacaaacatgctgattttgacacatggtttagccagcgtggtggtagttatactaatgacaaagcttgcccattgattgctgcagtcataacaagagaagtgggttttgtcgttcctggtttgcctggaacgatattacgcacaactaatggtgactttttgcatttcttacctagagtttttagtgcagttggtaacatctgttacacaccatcaaaacttatagagtacactgactttgcaacatcagcttgtgttttggctgctgaatgtacaatttttaaagacgcttctggtaagccagtaccatattgttatgataccaatgtactagaaggttctgttgcttatgaaagtttacgccctgacacacgttatgtgctcatggatggctctattattcaatttcctaacacctaccttgaaggttctgtaagagtggtaacaacttttgattctgagtactgtaggcacggcacttgtgaaagatcagaagctggtgtttgtgtatctactagtggtagatgggtacttaacaacgattattacagatctttaccaggagttttctgtggtgtagatgctgtaaatttgcttactaacatgtttacaccactaattcaacctattggtgctttggacatatcagcatctatagtagctggtggtattgtagctatcgtagtaacatgccttgcctactattttatgaggtttagacgtgcttttggtgaatacagtcatgtagttgcctttaatactctcctattccttatgtcattcactgtactctgtttaacaccagtttactcattcttacctggtgtttattctgttatttacctgtacttgacattttatctgactaatgatgtttcttttctcgcacatattcagtggatggttatgttcacacctttagtacctttctggataacaattgcttacatcatttgtatttccacaaagcatttctattggttctttagtaattacctaaagagacgtgtagtctttaatggtgtttcctttagtacttttgaagaagctgcgctgtgcacctttttgttaaataaggagatgtatctaaagttgcgtagtgatgtgctattacctcttacgcaatataatagatacttagctctttataacaagtacaagtatttcagtggagcaatggatacaactagctacagagaagctgcttgttgtcatctcgcaaaggctctcaatgacttcagtaactcaggttctgatgttctttaccaaccaccacaaacctctatcacctcagctgttttgcagagtggttttagaaaaatggcattcccatctggtaaagttgagggttgtatggtacaagtaacttgtggtacaactacacttaacggtctttggcttgatgacgtagtttactgtccaagacatgtgatctgcacctctgaagatatgcttaaccctaattatgaagatctactcatccgtaagtctaatcataacttcttggtacaggctggtaatgttcaactcagggttattggacattctatgcaaaattgtgtacttaagcttaaggttgatacagccaatcctaagacacctaagtataagtttgttcgcattcaaccaggacagactttttcagtgttagcttgttacaatggttcaccatctggtgtttaccaatgtgctatgaggcccaatttcactattaagggttcattccttaatggttcatgtggtagtgttggttttaacatagattatgactgtgtctctttttgttacatgcaccatatggaattaccaactggagttcatgctggcacagacttagaaggtaacttttatggaccttttgttgacaggcaaacagcacaagcagctggtacagatacaactattacagttaatgttcttgcttggttgtacgctgctgttataaatggagacaggtggtttctcaatcgatttaccacaactcttaatgactttaaccttgtggctatgaagtacaattatgaacctctaacacaagaccatgttgacatactaggacctctttctgctcaaactggaattgccgttttagatatgtgtgcttcattaaaagaacttctgcaaaatggtatgaatggacgtaccatattgggtagtgctttattagaagatgagtttacaccttttgatgttgttagacaatgctcaggtgttactttccaaagtgcagtgaaaagaacaatcaagggtacacaccactggttgttactcacaattttgacttcacttttagttttagtccagagtactcaatggtctttgttctttttcttctacgaaaatgcctttttaccttttgctatgggtattattgctatgtctgcttttgcaatgatgtttgtcaaacataagcatgcatttctctgtttgtttttgttaccttctcttgccactgtagcttactttaatatggtctacatgcctgctagttgggtgatgcgtattatgacatggttggatatggttgatactagtttgtctggttttaagctaaaagactgtgttatgtatgcatcagctgtagtgttactaatccttatgacagcaagaactgtgtatgatgatggtgctaggagagtgtggacacttatgaatgtcttgacactcgtttataaagtttactatggcaacgctttagatcaagccatttccatgtgggctcttataatctctgttacttctaactactcaggtgtagttacaactgtcatgtttttggccagaggtattgtttttatgtgtgttgagtattgccctattttcttcataactggtaatacacttcagtgtataatgctagtctattgtttcttaggctatttttgtacttgttacttcggcctcttttgtttactcaaccgctactttagactgactcttggtgtttatgattacttagtgtctacacaggagtttagatatatgaattcacagggactactcccacccaagaatagcatagatgccttcaaactcaacattaaattgttgggtgttggtggcaaaccttgtatcaaagtagccactgtacagtctaaaatgtcagatgtaaagtgcacatcagtagtcttactctcagttttgcaacaactcagagtagaatcatcatctaaattgtgggctcaatgtgtccagttacacaatgacattctcttagctaaagatactactgaagcctttgaaaaaatggtttcactactttctgttttgctttccatgcagggtgctgtagacataaacaagctttgtgaagaaatgctggacaacagggcaaccttacaagctatagcctcagagtttagttcccttccatcatatgcagcttttgctactgctcaagaagcttatgagcaggctgttgctaatggtgattctgaagttgttcttaaaaagttgaagaagtctttgaatgtggctaaatctgaatttgaccgtgatgcagccatgcaacgtaagttggaaaagatggctgatcaagctatgacccaaatgtataaacaggctagatctgaggacaagagggcaaaagttactagtgctatgcagacaatgcttttcactatgcttagaaagttggataatgatgcactcaacaacattatcaacaatgcaagagatggttgtgttcccttgaacataatacctcttacaacagcagccaaactaatggttgtcataccagactacaacacatataagaatacgtgtgatggtacaacatttacttatgcatcagcattgtgggaaatccaacaggttgtagatgcagatagtaaaattgttcagcttagtgaaattagtatggacaattcacctaatttagcatggcctcttattgtaacagctttaagggccaattctgctgtcaaattacagaataatgagcttagtcctgttgcactaagacaaatgtcttgtgctgccggtactacacaaactgcttgcactgatgacaatgcgttagcttactacaacacaacaaagggaggtaggtttgtacttgcactgttatccgatttacaggatttgaaatgggctagattccctaagagtgatggaactggtactatctatacagaactggaaccaccttgtaggtttgttacagacacacctaaaggtcctaaagtgaagtatctttacttcatcaaaggattaaacaacctaaatagaggtatggtacttggtagtttagctgccacagtacgtttacaagctggtaatgcaacagaagttcctgctaattcaactgtactttctttctgtgcttttgctgtagatgctgctaaagcttacaaagattatctagctagtgggggacaaccaatcactaattgtgttaagatgttgtgtacacacactggtactggtcaggcaataacagttacaccggaagccaatatggatcaagaatcctttggtggtgcatcgtgttgtctgtactgccgttgtcatatagatcatccaaatcctaaaggattttgtgacttaaaaggtaagtatgtacaaatacctacaacttgtgctaatgaccctgtgggttttacacttaaaaacacagtctgtaccgtctgcggtatgtggaaaggttatggttgtagttgtgatcaactccgcgaacccatgcttcagtcagctgatgcacaatcgtttttaaacgggtttgcggtgtaagtgcagcccgtcttacaccgtgcggcacaggcactagtactgatgtcgtatatagagcttttgacatctacaatgataaagtagctggttttgctaagttcctaaaaactaattgttgtcgcttccaagaaaaggacgaagatgacaatctcattgattcttactttgtagttaagagacacactttctctaactaccaacatgaagaaacaatttacaacctgcttaaggattgtccagctgttgctaaacatgacttctttaagtttagaatagacggtgacatggtaccacatatatcacgtcaacgtcttactaaatacacaatggcagacctcgtctatgctttaaggcattttgatgaaggtaattgtgacacattaaaagaaatacttgtcacatacaattgttgtgatgatgactacttcaataaaaaggactggtatgattttgtagaaaacccagatatattacgcgtatacgccaacttaggtgaacgtgtacgccaagctttgttaaaaacagtacagttctgtgatgccatgcgaaatgctggtattgttggtgtactgacattagataatcaagatctcaatggtaactggtatgactttggtgatttcatacaaaccacgccaggtagtggagttcctgttgtagactcttattattcattgctcatgcctatattaaccttgaccagggctttaactgcagagtcacatgttgacactgacttaacaaagccttacattaagtgggatttgttaaaatacgacttcacggaagagaggttaaaactctttgaccgttattttaaatactgggatcagacataccacccaaattgtgttaactgtttggatgacagatgcattctgcattgtgcaaactttaatgttctgttctctacagtgttcccacctacaagttttggaccactagtgagaaaaatatttgttgatggtgttccatttgtagtttcaactggataccacttcagagagctaggtgttgtacataatcaggatgtaaacttacatagctctagacttagttttaaggaattacttgtgtatgctgctgatcctgctatgcatgctgcttctggtaatctattactagataaacgcactacgtgcttttcagtagctgcacttactaacaatgttgcttttcaaactgtcaaacccggtaattttaacaaggacttctatgactttgctgtgtctaagggtttctttaaggaaggaagttctgttgaattaaaacacttcttctttgctcaggatggtaatgctgctatcagcgattatgactactatcgttataatctaccaacaatgtgtgatatcagacaactactatttgtagttgaagttgttgataagtactttgattgttacgatggtggctgtattaatgctaaccaagtcatcgtcaacaacctagacaaatcagctggttttccatttaataaatggggtaaggctagactttattatgattccatgagttatgaggatcaagatgcacttttcgcatatacaaaacgtaatgtcatccctactataactcaaatgaaccttaagtatgccattagtgcaaagaatagagctcgcaccgtagctggtgtctctatctgtagtactatgaccaatagacagtttcatcaaaaattactcaagtcaatagccgccactagaggagctactgtagtaattggaacaagcaaattctatggtggttggcacaacatgctcaaaactgtttatagtgatgtagaaaaccctcaccttatgggttgggattatcctaaatgtgatagagccatgcctaacatgcttagaattatggcctcacttgttcttgctcgcaaacatacaacgtgttgtagcttgtcacaccgtttctatagattagctaatgagtgtgctcaagtattgagtgaaatggtcatgtgtggcggttcactatatgttaaaccaggtggaacctcatcaggagatgccacaactgcttatgctaatagtgtgtttaacatttgtcaagctgtcacggccaatgttaatgcacttttatctactgatggtaacaaaattgccgataagtatgtccgcaatttacaacacagactttatgagtgtctctatagaaatagagatgttgacacagactttgtgaatgagttttacgcatatttgcgtaaacatttctcaatgatgatactctctgacgatgctgttgtgtgtttcaatagcacttatgcatctcaaggtctagtggctagcataaagaactttaagtcagttctttactatcaaaacaacgtttttatgtctgaagcaaaatgttggactgagactgaccttactaaaggacctcatgaattttgctctcaacatacaatgctagttaaacagggtgatgattatgtgtaccttccttacccagatccatcaagaatcctaggtgccggttgttttgtagatgatatcgtaaaaacagatggtacacttatgattgaacggttcgtgtctttagctatagatgcttacccacttactaaacatcctaatcaggagtatgctgatgtctttcatttgtacttacaatacatacgtaagctacatgatgagttaacaggacacatgttagacatgtattctgttatgcttactaatgataacacttcaaggtattgggaacctgagttttatgaggctatgtacacaccgcatacagtcttacaagctgttggtgcttgtgttctttgcaattcacagacttcattaagatgtggtgcttgcatacgtagaccattcttatgttgtaaatgctgttacgaccatgtcatctcaacatcacataaattagtcttgtctgttaatccgtatgtttgcaatgctccaggttgtgatgtcacagatgtgactcaactttacttaggaggtatgagctattactgtaagtcacataaaccacccattagttttccattgtgtgctaatggacaagtttttggtctctacaagaatacatgtgttggtagcgataatgttactgactttaatgcaattgcaacatgtgactggacaaatgctggtgattacattttagctaacacctgtactgaaagactcaagctttttgcagcagaaacgctcaaagctactgaggagacatttaaactgtcttatggtattgctactgtacgtgaagtgctgtctgacagagaattacatctttcatgggaagttggtaaacctagaccaccacttaaccgaaattatgtctttactggttatcgtgtaactaaaaacagtaaagtgcaaatcggagagtacacctttgaaaaaggtgactatggtgatgctgttgtttaccgaggtacaacaacttacaaactcaacgttggtgattattttgtgctgacatcacatacagtaatgccattaagtgcacctacactagtgccacaagagcactatgttagaattactggcttatacccaacactcaatatctcagatgagttttctagcaatgttgcaaattatcaaaaggttggtatgcaaaagtattctacactccagggaccacctggtactggtaaaagtcattttgctattggtctagctctctactacccttctgctcgcatagtatatacagcttgctctcatgcagctgttgatgcactatgtgagaaggcattaaaatatttgcccatagacaaatgtagtagaattatacctgcacgtgctcgtgtagagtgttttgataaattcaaggtgaattcaacattagaacagtatgtcttttgtactgtaaatgcattgcctgagacgacagcagatatagttgtctttgatgaaatttcaatggccacaaattatgatttgagtgttgtcaatgccagattacgtgctaagcactatgtgtacattggtgatcctgctcaattacctgcaccacgcacattactaactaagggtacactagaaccagaatatttcaattcagtgtgtagacttatgaaaactataggtccagacatgttcctcggaacttgtcgtagatgtcctgctgaaattgttgacactgtgagtgctttggtttatgataataagcttaaggcacataaagacaaatcagctcaatgctttaaaatgttctacaagggtgttatcacgcatgatgtttcatctgcaattaacaggccacaaataggcgtggtaagagaattccttacacgtaaccctgcttggagaaaagctgtctttatttcaccttacaattcccagaatgctgtagcctcaaagattttgggactaccaactcaaactgttgattcatcacagggctcagaatatgactatgtcatattcactcaaaccactgaaacagctcactcttgtaatgtaaacagattcaacgttgctattaccagagcaaaagtaggcatactttgcataatgtctgatagagacctttatgacaagttgcaatttacaagtcttgaaattccacgtaggaatgtggcaactttacaagctgaaaatgtaacaggactctttaaagattgtagtaaggtaatcactgggttacatcctacacaggcacctacacacttaagtgttgatactaaattcaaaactgaaggtttatgtgttgacatacctggcatacctaaggacatgacctatagaagattaatctctatgatgggtttcaaaatgaattaccaggttaatggttaccctaacatgtttatcacccgcgaagaagctataagacatgtacgtgcatggattggcttcgatgtcgaaggttgtcatgctactagagaagctgttggtaccaatttacctttacagctaggtttttctacaggtgttaacctagttgctgtacctacaggttatgttgatacacctaataatacagatttttccagagttagtgctaaaccaccgcctggagatcaatttaaacacctcataccacttatgtacaaaggacttccttggaatgtagtgcgtataaagattgtccaaatgttaagtgacacacttaaaaatctctctgacagagtcgtatttgtcttatgggcacatggctttgagttgacatctatgaagtattttgtgaagatcggacctgagcgcacatgttgtctatgtgatagacgtgctacatgcttttccactgcttcagacacttatgcctgttggcatcattctattggatttgattacgtctataatccgtttatgattgatgttcaacaatggggttttacaggtaacctacaaagcaaccatgatctgtattgtcaagtccatggtaatgcacatgtagctagttgtgatgcaatcatgactaggtgtctagctgtccacgagtgctttgttaagcgtgttgactggactattgaatatcctataatcggtgatgaactgaagattaatgcggcttgtagaaaggttcaacacatggttgttaaagctgcattattagcagacaaattcccagttcttcacgacattggtaaccctaaagctattaagtgtgtacctcaagctgatgtagaatggaagttctatgatgcacagccttgtagtgacaaagcttacaaaatagaagaactgttctattcttatgccacacattctgacaaattcacagatggtgtatgcctattttggaattgcaatgtcgatagatatcctgctaattccattgtttgtagatttgacactagagtgctatctaaccttaacttgcctggttgtgatggtggcagtttgtatgtaaataagcatgcattccacacaccagcttttgataaaagtgcttttgttaatctaaagcaacttccatttttctattactctgacagtccatgtgagtctcatggaaaacaagtagtgtcagatatagattatgtaccactaaagtctgctacgtgtataacacgttgcaatttaggtggtgctgtctgtagacatcatgctaatgagtacagattgtatctcgatgcttataacatgatgatctcagctggctttagcttgtgggtttacaaacaatttgatacctataacctctggaacacttttacaagacttcagagtttagaaaatgtggcttttaatgttgtaaataagggacactttgatggacaacagggtgaagtaccagtttctatcattaacaacactgtttacacaaaagttgatggtgttgatgtagaattgtttgagaacaaaaccacattacctgttaatgtagcatttgagctttgggctaagcgcaacattaaaccagtaccagaggtgaaaatactcaataatttgggtgtggacattgctgctaatactgtgatctgggactacaaaagagatgctccagcacatatatctactattggtgtttgttctatgactgacatagccaagaaaccaactgaaacgatttgtgcaccactcactgtcttttttgatggtagagttgatggtcaagtagacttatttagaaatgcccgtaatggtgttcttattacagaaggtagtgttaaaggtttacaaccatctgtaggtcccaaacaagctagtcttaatggagtcacattaattggagaagccgtaaaaacacagttcaattattacaagaaagtggatggtgttgtccaacaattacctgaaacttactttactcagagtagaaacttacaggaatttaagcccaggagtcaaatggaaattgatttcttagaacttgctatggatgaattcattgaacggtataaattagaaggctatgccttcgaacatatcgtttatggagattttagtcatagtcagttaggtggtttacatctactgattggactagctaaacgttttaaggaatcaccttttgaacttgaagattttattcctatggacagtacagttaaaaactacttcataacagatgcgcaaacaggttcatctaagtgtgtgtgttctgttattgatcttttacttgatgacttcgttgaaataataaagtcccaagatttatctgtagtttctaaggttgtcaaagtgactattgactatacagaaatctcatttatgctttggtgtaaagatggccatgtagaaacattttacccaaaattacaatctagtcaagcgtggcaaccgggtgttgctatgcctaatctttacaaaatgcaaagaatgctattagaaaagtgtgaccttcaaaattatggtgatagtgcaacattacctaaaggcataatgatgaatgtcgcaaaatatactcaactgtgtcaatatttaaacacactgacattagctgtaccctataatatgagagttatccattttggtgctggttctgataaaggagttgcaccaggtacagctgttttaagacaatggttgcctacaggtacgctgcttgtcgattcagatcttaatgactttgtctctgatgcagattcaactttgattggtgattgtgcaactgtacatacagctaataaatgggatctcattattagtgatatgtacgaccctaagactaagaatgtcacaaaagaaaacgactctaaagagggttttttcacttacatttgtgggtttatacaacaaaagctagctcttggaggttccgtggctataaagataacagaacattcttggaatgctgatctttataagctcatgggacacttcgcatggtggacagcctttgttactaatgtgaatgcgtcatcatctgaagcatttttaatcggatgtaactaccttggcaaaccacgcgaacaaatagatggttatgtcatgcatgcaaattacatattttggaggaatacaaatccaattcagctttcttcttattctttattcgacatgagtaaattcccccttaaattaaggggtactgctgttatgtctttaaaagaaggtcaaatcaatgatatgattctctctcttcttagtaaaggtagacttataattagagaaaacaacagagttgttatttctagtgatgttcttgttaacaactaaacgaacaatgtttgtttttcttgttttattgccactagtctctagtcagtgtgttaatcttacaaccagaactcaattaccccctgcatacactaattctttcacacgtggtgtttattaccctgacaaagttttcagatcctcagttttacattcaactcaggacttgttcttacctttcttttccaatgttacttggttccatgctatacatgtctctgggaccaatggtactaagaggtttgataaccctgtcctaccatttaatgatggtgtttactttgcttccactgagaagtctaacataataagaggctggatttttggtactactttagattcgaaaacccagtccctacttattgttaataacgctactaatgttgttatcaaagtctgtgaatttcaattttgtaacgatccatttttgggtgtttattaccacaaaaacaacaaaagttggatggaaagtgagttcagagtttattctagtgcgaataattgcacttttgaatacgtctctcagccttttcttatggaccttgaaggaaaacagggtaatttcaaaaatcttagggaatttgtgttcaagaatattgatggttacttcaagatatactctaagcacacgcctattaatttagtgcgtgatctccctcagggtttttcggctttagaaccattggtagatttgccaataggtattaacatcactaggtttcaaactttacttgctttacatagaagttatttaactcctggtgattcttcttcaggttggacagctggtgctgcagcttattatgtgggttatcttcaacctaggacttttctactgaagtacaatgaaaatggaaccattacagatgctgtagactgtgcacttgaccctctctcagaaacaaagtgtacgttgaaatccttcactgtagaaaaaggaatctatcaaacttctaactttagagtccaaccaacagaatctattgttagatttcctaacatcacaaacttgtgcccttttggtgaagtttttaacgccaccagatttgcatctgtttatgcttggaacaggaagagaatcagcaactgtgttgctgattattctgtcctgtataattccgcatcattttccacttttaagtgttatggagtgtctcctactaaattaaatgatctctgctttactaatgtctatgcagattcatttgtaattagaggtgatgaagtcagacaaatcgctccagggcaaactggaaagattgctgattataactacaaattaccagatgattttacaggctgcgttatagcttggaattctaacaatcttgattctaaggttggtggtaattataattacctgtacagattgtttaggaagtctaatctcaaaccttttgagagagatatttcaactgaaatctatcaggccggtagcacaccttgtaatggtgttgaaggttttaattgttactttcctctgcaatcatatggtttccaacccactaatggtgttggttaccaaccatacagagtagtagtactttcttttgaacttctacatgcaccagcaactgtttgtggacctaaaaagtctactaatttggttaagaacaagtgtgtcaatttcaacttcaatggtttaacaggcacaggtgttcttactgagtctaacaaaaagtttctgcctttccaacaatttggcagagacattgctgacactactgatgctgttcgtgatccacaaacacttgagattcttgacattacaccatgttcttttggtggtgtcagtgttataacaccaggaacaaatacttctaaccaggttgctgttctttatcaggatgttaactgcacagaagtccctgttgctattcatgcagatcaacttactcctacttggcgtgtttattctacaggttctaatgtttttcaaacacgtgcaggctgtttaataggggctgaacatgtcaacaactcatatgagtgtgacatacccattggtgcaggtatatgcgctagttatcagactcagactaattctcctcggagagcaagaagtgtagctagtcaatccatcattgcctacactatgtcacttggtgcagaaaattcagttgcttactctaataactctattgccatacccacaaattttactattagcgttaccacagaaattctaccagtgtctatgaccaagacatcagtagattgtacaatgtacatttgtggtgattcaactgaatgcagcaatcttttgttgcaatatggcagtttttgtacacaattaaaccgtgctttaactggaatagctgttgaacaagacaaaaacacccaagaagtttttgcacaagtcaaacaaatttacaagacaccaccaattaaagattttggcggttttaattttagccagatactgccagatccatcaaaaccaagcaagaggtcatttattgaagatctactgttcaacaaagtgacacttgcagatgctggcttcatcaaacaatatggtgattgccttggtgatattgctgctagagacctcatttgtgcacaaaagtttaacggccttactgttttgccacctttgctcacagatgaaatgattgctcaatacacttctgcactgttagcaggtacaatcacttctggttggacttttggtgcaggtgctgcattacaaataccatttgctatgcaaatggcttataggtttaatggtattggagttacacagaatgttctctatgagaaccaaaaattgattgccaaccaatttaatagtgctattggcaaaattcaagactcactttcttccacagcaagtgcacttggaaaacttcaagatgtggtcaaccaaaatgcacaagctttaaacacgcttgttaaacaacttagctccaattttggtgcaatttcaagtgttttaaacgacatcctttcacgtcttgacaaagttgaggctgaagtgcaaattgataggttgatcacaggcagacttcaaagtttgcagacatatgtgactcaacaattaattagagctgcagaaatcagagcttctgctaatcttgctgctactaaaatgtcagagtgtgtacttggacaatcaaaaagagttgacttttgcggaaagggctatcatcttatgtcatttcctcagtcagcacctcatggtgtcgtctttttgcatgtgacttatgtccctgcacaagaaaagaacttcacaactgctcctgccatttgtcatgatggaaaagcacactttcctcgtgaaggtgtctttgtttcaaatggcacacactggtttgtaacacaaaggaatttttatgaaccacaaatcattactacagacaacacatttgtgtctggtaactgtgatgttgtaataggaattgtcaacaacacagtttatgatcctttgcaacctgaattagactcattcaaggaggagcttgataaatacttcaagaaccatacctcaccagatgttgatttaggtgacatctctggcattaatgcttcagttgtaaacattcagaaagaaatcgaccgcctcaatgaggttgccaagaatttaaatgaatctctcatcgatctccaagaacttggaaagtatgagcagtatataaaatggccatggtacatttggctaggttttatagctggcttgattgccatagtaatggtgacaattatgctttgctgtatgaccagttgctgtagttgtctcaagggctgttgttcttgtggatcctgctgcaaatttgacgaggacgactctgagccagtgctcaaaggagtcaaattacattacacataaacgaacttatggatttgtttatgagaatcttcacaattggaactgtaactttgaagcaaggtgaaatcaaggatgctactccttcagattttgttagagctactgcaacgataccgatacaagcatcacttcctttcggatggcttattgttggcgttgcacttcttgctgtttttcagagcgcttccaaaatcataaccctcaaaaagagatggcaactagcactctccaagggtgttcactttgtttgcaacttgctgttgttgtttgtaacagtttactcacatcttttgcttgttgctgctggccttgaagccccttttctctatctttatgctttagtctacttcttgcagagtataaactttgtacgcataataatgaggctttggctttgctggaaatgccgttccaaaaacccattactttatgatgccaactattttctttgctggcatactaattgttacgactattgtataccttacaatagtgtaacttcttcaattgtcattacttcaggtgatggcacaacaagtcctatttctgaacatgactaccagattggtggttatactgaaaaatgggaatctggagtaaaagactgtgttgtattacacagttacttcacttcagactattaccagctgtactcaactcaattgagtacagacactggtgttgaacatgttaccttcttcatctacaataaaatcgttgatgagcctgaagaacatgtccaaattcacacaatcgacgtttcatccggagttgttaatccagtaatggaaccaatttatgatgaaccgacgacgactactagcgtgcctttgtaagcacaagctgatgagtacgaacttatggcagattccaacggtactattaccgttgaggagctgaaaaagctccttgaacaatggaacctagtaataggtttcctattccttacatggatttgcctgctgcaatttgcctatgccaacaggaataggtttttgtacatcattaagttgattttcctctggctgttatggccagtaactttagcttgttttgtgcttgctgctgtttacagaataaattggatcaccggtggaattgctattgcaatggcttgtcttgtaggattgatgtggctaagctacttcattgcttctttcagactgtttgcgcgtacgcgttccatgtggtcattcaatccagaaactaacattcttctcaacgtgccactccatggaactattctgactagaccgcttctagaaagtgaactcgtaatcggagctgttatccttcgtggacatcttcgtattgctggacatcatctaggacgctgtgacatcaaggatctacctaaagaaatcactgttgctacatcacgaacgctttcttattacaaattgggagcttcacagcgtgtagcaggtgattcaggttttgctgcatatagtcgctacaggattggcaactataaattaaacacagaccattccagtagcagtgacaatattgctttgcttgtacagtaagtgacaacagatgtttcatctcgttgactttcaggttactatagcagagatattactaatcatcatgaggacttttaaagtttccatttggaatcttgattacatcataaacctcataattaagaacttaagcaagtcactaactgagaataaatattctcaactagacgaggagcagccaatggagattgattaaacgaacatgaaaattattcttttcttggcactgataacactcgctacttgtgagctttatcactaccaagagtgtgttagaggtacaacagtacttttaaaagaaccttgctcgtcgggaacatacgagggcaattcaccatttcatcctctagctgataacaaatttgcactgacttgctttagcactcaatttgcttttgcttgtcctgacggcgtaaaacacgtctatcagttacgtgccagatcagtttcacctaaactgttcatcagacaagaggaagttcaagaactttactctccaatttttcttattgttgcggcaatagtgtttataacactttgcttcacactcaaaagaaagacagaatgattgaactttcattaattgacttctatttgtgctttttagcctttctgctattccttgttttaattatgcttattatcttttggttctcacttgaactgcaagatcataatgaaacttgtcacgcctaagacgttcgtgttgttttagatttcatctaaacgaacaaactaaaatgtctgataatggacctcaaaatcagcgaaatgcacctcgcattacgtttggtggaccatcagattcaactggcagtaaccagaatggagaacgaagtggtgcgcgatcaaaacaacgccgcccgcaaggtttacccaataatactgcgtcttggttcaccgctctcactcaacatggcaaggaagatttaaaattccctcgaggacaaggcgttccaattaacaccaatagcagtccagatgaccaaattggctactaccgccgcgccacaagacgaattcgtggtggtgatggtaaaatgaaagatctcagtccaagatggtatttctactatctaggaactgggccagaagctggacttccttatggtgctaacaaagatggcatcatatgggttgcaactgagggagccttgaatacaccaaaagatcacattggcaccagaaatcctgctaacaatgctgcaatcgtgctacaacttcctcaaggaacaacattaccaaaaggtttttacgcagaagggtctagaggtggaagtcaagcctcttctagatcatcatcacgtagtcgcaacagttcaagaaattcaactccaggttcaagtagaggaacttctcctgctagaatggctggaaatggaggtgatgctgctcttgctttgttactacttgacagattgaaccagcttgagagcaaaatgtctggtaaaggccaacaacaacaaggccaaactgtcactaagaaatctgctgctgaggcttctaagaagcctagacaaaaacgtactgccactaaagcatacaatgtaacacaagctttcggcagacgtggtccagaacaaactcaaggaaattttggggatcaggaactaatcagacaaggaactgattacaaacattggccgcaaattgcacaatttgctccttctgcttcagcgttctttggaatgtcgagaattggaatggaagtcacaccttcgggaacatggttgacctatacaggtgccatcaaattggatgacaaagatccaaatttcaaagatcaagtcattttgctgaataagcatattgacgcatacaaaacattcccaccaacagagcctaaaaaggacaaaaagaagaaggctgatgaaactcaagccttaccgcagagacagaagaaacagcaaactgtgactcttcttcctgctgcagatttggatgatttctccaaacaattgcaacaatccatgagcagtgctgactcaactcaggcctaaactcatgcagaccacacaaggcagatgggctatataaacgttttcgcttttccgtttacgatatatagtctactcttgtgcagaatgaattctcgtaactacatagcacaagtagatgtagttaactttaatctcacatagcaatctttaatcagtgtgtaacattagggaggacttgaaagagccaccacattttcaccgaggccacgcggagtacgatcgagtgtacagtgaacaatgctagggagagctgcctatatggaagagccctaatgtgtaaaattaattttagtagtgctatccccatgtgattttaatagcttcttaggagaatgacaaaaaaaaacaaaaaaaa

SEQ ID NO: 43 - DNA, 29152 bp, Artificial Sequence
  Synthesis optimized sequence E-protein ORF6, and ORF8 triple deletion
caaatataacgaaaggctcagtcgaaagactgggcctttcgttttatctgttgtttgtcgtaatacgactcactatagggattaaaggtttataccttcccaggtaacaaaccaaccaactttcgatctcttgtagatctgttctctaaacgaactttaaaatctgtgtggctgtcactcggctgcatgcttagtgcactcacgcagtataattaataactaattactgtcgttgacaggacacgagtaactcgtctatcttctgcaggctgcttacggtttcgtccgtgttgcagccgatcatcagcacatctaggtttcgtccgggtgtgaccgaaaggtaagatggagagccttgtccctggtttcaacgagaaaacacacgtccaactcagtttgcctgttttacaggttcgcgacgtgttagtacgtggttttggagattcagtggaagaagtcttatcagaggcacgtcaacatcttaaagatggcacttgtggcttagtagaagttgaaaaaggcgttttgcctcaacttgaacagccctatgtgttcatcaaacgttctgatgctagaactgcacctcatggtcatgttatggttgagctggtagcagaattagaaggtattcagtacggtcgtagtggtgagacattaggtgttttagttcctcatgtgggcgaaataccagtggcttaccgcaaagttcttcttagaaagaacggtaataaaggagctggtggccatagttacggcgctgatttaaagtcatttgacttaggcgacgagcttggcactgatccttatgaagatttccaagaaaactggaacactaaacatagcagtggtgttacccgtgaactcatgcgtgagttaaatggaggtgcatacactcgctatgtcgataacaacttctgtggacctgatggttaccctcttgagtgcattaaagaccttctagcacgtgctggtaaagcttcatgcactttgtccgaacaactggactttattgacactaagaggggtgtatactgctgccgtgaacatgagcatgaaattgcttggtacacggaacgttctgaaaagagctatgaattgcagacaccttttgaaattaaactggcaaagaaatttgacaccttcaatggggaatgtccaaattttgtatttcccctcaattccataatcaagactattcaaccaagggttgaaaagaaaaagcttgatggctttatgggtagaattcgatctgtctatccagttgcgtcaccaaatgaatgcaaccaaatgtgcctttcaactctcatgaagtgtgatcattgtggtgaaacttcatggcagacgggcgattttgttaaagccacttgcgaattttgtggcactgagaatttgactaaagaaggtgccactacttgtggttacttaccccaaaatgctgttgttaaaatttactgtccagcatgtcacaattcagaagtaggacctgagcatagtcttgccgaataccataatgaatctggcttgaaaaccattcttcgtaagggtggtcgcactattgcttttggaggatgtgtgttctcttatgttggttgccataacaagtgtgcttattgggttccacgtgcttcagctaacataggttgtaaccatacaggtgttgttggagaaggttccgaaggtcttaatgacaaccttcttgaaatactccaaaaagagaaagtcaacatcaatattgttggtgactttaaacttaatgaagagatcgccattattttggcatctttttctgcttccacaagtgcttttgtggaaactgtgaaaggtttggattataaagcattcaaacagattgttgaatcctgtggtaattttaaggttacaaagggaaaagctaaaaaaggtgcctggaatattggtgaacagaaatcaatactgagtcctctttatgcatttgcatcagaggctgctcgtgttgtacgatcaattttctcccgcactcttgaaactgctcaaaattctgtgcgtgttttacagaaggccgctataacaatactagatggaatttcacagtattcactgagactcattgatgctatgatgttcacatctgatttggctactaacaatctagttgtaatggcctacattacaggtggtgttgttcagttgacttcgcagtggctaactaacatctttggcactgtttatgaaaaactcaaacccgtccttgattggcttgaagagaagtttaaggaaggtgtagagtttcttagagacggttgggagattgttaaattcatctcaacctgtgcttgtgaaattgtcggtggacaaattgtcacctgtgctaaggaaattaaggagagtgttcagacattctttaagcttgtaaacaagtttttggctttgtgtgctgactctatcattattggtggagctaaacttaaagccttgaatttaggtgaaacatttgtcacgcactcaaagggattgtacagaaagtgtgttaaatccagagaagaaactggcctactcatgcctctaaaagccccaaaagaaattatcttcttagagggagaaacacttcccacagaagtgttaacagaggaagttgtcttgaaaactggtgatttacaaccattagaacaacctactagtgaagctgttgaagctccattggttggtacaccagtttgtattaacgggcttatgttgctcgaaatcaaagacacagaaaagtactgtgcccttgcacctaatatgatggtaacaaacaataccttcacactcaaaggcggtgcaccaacaaaggttacttttggtgatgacactgtgatagaagtgcaaggttacaagagtgtgaatatcacttttgaacttgatgaaaggattgataaagtacttaatgagaagtgctctgcctatacagttgaactcggtacagaagtaaatgagttcgcctgtgttgtggcagatgctgtcataaaaactttgcaaccagtatctgaattacttacaccactgggcattgatttagatgagtggagtatggctacatactacttatttgatgagtctggtgagtttaaattggcttcacatatgtattgttctttctaccctccagatgaggatgaagaagaaggtgattgtgaagaagaagagtttgagccatcaactcaatatgagtatggtactgaagatgattaccaaggtaaacctttggaatttggtgccacttctgctgctttacaacctgaagaagaacaagaagaagattggttagatgatgatagtcaacaaactgttggtcaacaagacggcagtgaggacaatcagacaactactattcaaacaattgttgaggttcaacctcaattagagatggaacttacaccagttgttcagactattgaagtgaatagttttagtggttatcttaaacttactgacaatgtatacatcaagaatgcagacattgtggaagaagctaaaaaggtaaaaccaacagtggttgttaatgcagccaatgtttaccttaaacatggaggaggtgttgcaggagccttaaataaggctactaacaatgccatgcaagttgaatctgatgattacatagctactaatggaccacttaaagtgggtggtagttgtgttttaagcggacacaatcttgctaaacactgtttacatgttgtcggcccaaatgttaacaaaggtgaagatattcaacttcttaagagtgcttatgaaaattttaaccagcacgaagttctacttgcaccattattatcagctggtatttttggtgctgaccctatacattctttaagagtttgtgtagatactgttcgcacaaatgtctacttagctgtctttgataaaaatctctatgacaaacttgtttcaagctttttggaaatgaagagtgaaaagcaagttgaacaaaagatcgctgagattcctaaagaggaagttaagccatttataactgaaagtaaaccttcagttgaacagagaaaacaagatgataagaagatcaaagcttgtgttgaagaagttacaacaactctggaagaaactaagttcctcacagaaaacttgctcctttatatcgacattaatggcaatcttcatccagattctgccactcttgttagtgacattgacatcactttcttaaagaaagatgctccatatatagtgggtgatgttgttcaagagggtgttttaactgctgtggttatacctactaaaaaggctggtggcactactgaaatgctagcgaaagctttgagaaaagtgccaacagacaattatataaccacttacccgggtcagggtttaaatggttacactgtagaggaggcaaagacagtgcttaaaaagtgtaaaagtgccttttacattctaccatctattatctctaatgagaagcaagaaattcttggaactgtttcttggaatttgcgagaaatgcttgcacatgcagaagaaacacgcaaattaatgcctgtctgtgtggaaactaaagccatagtttcaactatacagcgtaaatataagggtatcaagatacaagagggtgtggttgattatggtgctagattttacttttacaccagtaaaacaactgtagcgtcacttatcaacacacttaacgatctaaatgaaactcttgttacaatgccacttggctatgtaacacatggcttaaatttggaagaagctgctcggtatatgagatctctcaaagtgccagctacagtttctgtttcttcacctgatgctgttacagcgtataatggttatcttacttcttcttctaaaacacctgaagaacattttattgaaaccatctcacttgctggttcctataaagattggtcctattctggacaatctacacaactaggtatagaatttcttaagagaggtgataaaagtgtatattacacgtccaatcctaccacattccacctagatggtgaagttatcacctttgacaatcttaagacacttctttctttgagagaagtgaggactattaaggtgtttacaacagtagacaacattaacctccacacgcaagttgtggacatgtcaatgacatatggacaacagtttggtccaacttatttggatggagctgatgttactaagataaaacctcataactcacatgaaggtaaaacattttacgttttgcctaatgatgacactctacgtgttgaggcttttgagtactaccacacaactgatcctagttttctgggtaggtacatgtcagcattaaatcacactaaaaagtggaaatacccacaagttaatggtttaacttcgattaaatgggcagataacaactgttatcttgccactgcattgttaacactccaacaaatagagttgaagtttaatccacctgctctacaagatgcttattacagagcaagggctggtgaagctgctaacttttgtgcacttatcttagcctactgtaataagacagtaggtgagttaggtgatgttagagaaacaatgagttacttgtttcaacatgccaatttagattcttgcaaaagagtcttgaacgtggtgtgtaaaacttgtggacaacagcagacaacccttaagggtgtagaagctgttatgtacatgggcacactttcttatgaacaattcaagaaaggtgttcagataccttgtacgtgtggtaaacaagctacaaaatatctagtacaacaggagtcaccttttgttatgatgtcagcaccacctgctcagtatgaacttaagcatggtacatttacttgtgctagtgagtacactggtaattaccagtgtggtcactataagcatataacttctaaggaaactttgtattgcatagacggtgctttacttacaaagtcctcagaatacaaaggtcctattacggatgttttctacaaagaaaacagttacacaacaaccataaaaccagttacttataagttggatggtgttgtttgtacagaaattgaccctaagttggacaattattataagaaggacaactcttatttcacagagcaaccaattgatcttgtaccaaaccaaccatatccaaacgcaagcttcgataattttaagttcgtatgcgataatatcaaatttgctgatgatctcaaccagttaactggttataagaaacctgcttcaagagagcttaaagttacatttttccctgacttaaatggtgatgtggtggctattgattataaacactacacaccctcttttaagaaaggagctaaattgttacataagcctattgtttggcatgttaacaatgcaactaataaagccacgtataaaccaaatacctggtgtatacgttgtctttggagcacaaaaccagttgaaacatcaaattcgtttgatgtactgaagtcagaggacgcgcagggaatggataatcttgcatgtgaagatctaaaaccagtctctgaagaagtagtggaaaatcctaccatacagaaagacgttcttgagtgtaatgtgaaaactaccgaagttgtaggagacattatacttaaaccagcaaataatagtttgaagatcacagaagaggttggccacacagatctaatggctgcttatgtagacaattctagtcttactattaagaaacctaatgaactctctagagtattaggtttgaaaacccttgctactcatggtttagctgctgttaatagtgtcccttgggatactatagctaattatgctaagccttttcttaacaaagttgttagtacaactactaacatagttacacggtgtcttaatcgtgtttgtactaattatatgccttacttctttactttattgctacaattgtgtacttttactagaagtacaaattctagaatcaaggcatctatgccgactactatagcaaagaatactgttaagagtgtcggtaaattttgtctagaggcttcatttaattatctcaagtcacctaacttttctaagctgataaacattatcatctggtttttgctattaagtgtttgcctaggttctttaatctactcaaccgctgctttaggtgttttaatgtctaatttaggcatgccttcttactgtactggttacagagaaggctatttgaactctactaatgtcactattgcaacctactgtactggatctataccttgtagtgtttgtcttagtggtttagattctttagacacctatccttctcttgaaactatacagattaccatttcatctttcaaatgggatttaactgcttttggcttagttgcagagtggtttttggcatatattcttttcactaggtttttctatgtacttggattggctgcaatcatgcaattgtttttcagctattttgcagtccattttattagtaactcttggcttatgtggcttataattaatcttgtgcagatggccccgatttcagctatggttagaatgtacatcttctttgcctcattttattatgtgtggaaaagttatgtgcatgttgtagacggttgtaattcatcaacttgtatgatgtgttacaaacgtaatagagcaacaagagtcgaatgtacaactattgttaatggtgttagaaggtccttttatgtctatgctaatggaggtaaaggcttttgcaaactacacaattggaattgtgttaattgtgatacattctgtgctggtagtacatttattagtgatgaagttgcgagagacttgtcactacagtttaaaagaccaataaatcctactgaccaatcttcttacatcgttgatagtgttacagtgaagaatggttccatccatctttactttgataaagctggtcaaaagacttatgaaagacattctctctctcattttgttaacttagacaacctgagagctaataacactaaaggttcattgcctattaatgttatcgttttcgacggtaaatcaaaatgtgaagaatcatctgcaaaatcagcgtctgtttactacagtcagcttatgtgtcaacctatactgttactagatcaggcattagtgtctgatgttggtgatagtgcggaagttgcagttaaaatgtttgatgcttacgttaatacgttttcatcaacttttaacgtaccaatggaaaaactcaaaacactagttgcaactgcagaagctgaacttgcaaagaatgtgtccttagacaatgtcttatctacgtttatttcagcagctcggcaagggtttgttgattcagatgtagaaactaaagatgttgttgaatgtcttaaattgtcacatcaatctgacatagaagttactggcgatagttgtaataactatatgctcacctataacaaagttgaaaacatgacaccccgtgaccttggtgcttgtattgactgtagtgctagacatattaatgcgcaggtagcaaaaagtcacaacattgctttgatatggaacgttaaagatttcatgtcattgtctgaacaactacgaaaacaaatacgtagtgctgctaaaaagaataacttacccttcaagttgacatgtgcaactactagacaagttgttaatgttgtaacaacaaagatagcacttaagggtggtaaaattgtgaataactggttgaagcagcttattaaagttacacttgtgttcctttttgttgctgctattttctatctgataacacctgttcatgtcatgtctaaacatactgacttttcaagtgaaatcataggatacaaggctattgatggtggtgtcactcgtgacatagcatctacagatacttgttttgctaacaaacatgctgattttgacacatggtttagccagcgtggtggtagttatactaatgacaaagcttgcccattgattgctgcagtcataacaagagaagtgggttttgtcgttcctggtttgcctggaacgatattacgcacaactaatggtgactttttgcatttcttacctagagtttttagtgcagttggtaacatctgttacacaccatcaaaacttatagagtacactgactttgcaacatcagcttgtgttttggctgctgaatgtacaatttttaaagacgcttctggtaagccagtaccatattgttatgataccaatgtactagaaggttctgttgcttatgaaagtttacgccctgacacacgttatgtgctcatggatggctctattattcaatttcctaacacctaccttgaaggttctgtaagagtggtaacaacttttgattctgagtactgtaggcacggcacttgtgaaagatcagaagctggtgtttgtgtatctactagtggtagatgggtacttaacaacgattattacagatctttaccaggagttttctgtggtgtagatgctgtaaatttgcttactaacatgtttacaccactaattcaacctattggtgctttggacatatcagcatctatagtagctggtggtattgtagctatcgtagtaacatgccttgcctactattttatgaggtttagacgtgcttttggtgaatacagtcatgtagttgcctttaatactctcctattccttatgtcattcactgtactctgtttaacaccagtttactcattcttacctggtgtttattctgttatttacctgtacttgacattttatctgactaatgatgtttcttttctcgcacatattcagtggatggttatgttcacacctttagtacctttctggataacaattgcttacatcatttgtatttccacaaagcatttctattggttctttagtaattacctaaagagacgtgtagtctttaatggtgtttcctttagtacttttgaagaagctgcgctgtgcacctttttgttaaataaggagatgtatctaaagttgcgtagtgatgtgctattacctcttacgcaatataatagatacttagctctttataacaagtacaagtatttcagtggagcaatggatacaactagctacagagaagctgcttgttgtcatctcgcaaaggctctcaatgacttcagtaactcaggttctgatgttctttaccaaccaccacaaacctctatcacctcagctgttttgcagagtggttttagaaaaatggcattcccatctggtaaagttgagggttgtatggtacaagtaacttgtggtacaactacacttaacggtctttggcttgatgacgtagtttactgtccaagacatgtgatctgcacctctgaagatatgcttaaccctaattatgaagatctactcatccgtaagtctaatcataacttcttggtacaggctggtaatgttcaactcagggttattggacattctatgcaaaattgtgtacttaagcttaaggttgatacagccaatcctaagacacctaagtataagtttgttcgcattcaaccaggacagactttttcagtgttagcttgttacaatggttcaccatctggtgtttaccaatgtgctatgaggcccaatttcactattaagggttcattccttaatggttcatgtggtagtgttggttttaacatagattatgactgtgtctctttttgttacatgcaccatatggaattaccaactggagttcatgctggcacagacttagaaggtaacttttatggaccttttgttgacaggcaaacagcacaagcagctggtacagatacaactattacagttaatgttcttgcttggttgtacgctgctgttataaatggagacaggtggtttctcaatcgatttaccacaactcttaatgactttaaccttgtggctatgaagtacaattatgaacctctaacacaagaccatgttgacatactaggacctctttctgctcaaactggaattgccgttttagatatgtgtgcttcattaaaagaacttctgcaaaatggtatgaatggacgtaccatattgggtagtgctttattagaagatgagtttacaccttttgatgttgttagacaatgctcaggtgttactttccaaagtgcagtgaaaagaacaatcaagggtacacaccactggttgttactcacaattttgacttcacttttagttttagtccagagtactcaatggtctttgttctttttcttctacgaaaatgcctttttaccttttgctatgggtattattgctatgtctgcttttgcaatgatgtttgtcaaacataagcatgcatttctctgtttgtttttgttaccttctcttgccactgtagcttactttaatatggtctacatgcctgctagttgggtgatgcgtattatgacatggttggatatggttgatactagtttgtctggttttaagctaaaagactgtgttatgtatgcatcagctgtagtgttactaatccttatgacagcaagaactgtgtatgatgatggtgctaggagagtgtggacacttatgaatgtcttgacactcgtttataaagtttactatggcaacgctttagatcaagccatttccatgtgggctcttataatctctgttacttctaactactcaggtgtagttacaactgtcatgtttttggccagaggtattgtttttatgtgtgttgagtattgccctattttcttcataactggtaatacacttcagtgtataatgctagtctattgtttcttaggctatttttgtacttgttacttcggcctcttttgtttactcaaccgctactttagactgactcttggtgtttatgattacttagtgtctacacaggagtttagatatatgaattcacagggactactcccacccaagaatagcatagatgccttcaaactcaacattaaattgttgggtgttggtggcaaaccttgtatcaaagtagccactgtacagtctaaaatgtcagatgtaaagtgcacatcagtagtcttactctcagttttgcaacaactcagagtagaatcatcatctaaattgtgggctcaatgtgtccagttacacaatgacattctcttagctaaagatactactgaagcctttgaaaaaatggtttcactactttctgttttgctttccatgcagggtgctgtagacataaacaagctttgtgaagaaatgctggacaacagggcaaccttacaagctatagcctcagagtttagttcccttccatcatatgcagcttttgctactgctcaagaagcttatgagcaggctgttgctaatggtgattctgaagttgttcttaaaaagttgaagaagtctttgaatgtggctaaatctgaatttgaccgtgatgcagccatgcaacgtaagttggaaaagatggctgatcaagctatgacccaaatgtataaacaggctagatctgaggacaagagggcaaaagttactagtgctatgcagacaatgcttttcactatgcttagaaagttggataatgatgcactcaacaacattatcaacaatgcaagagatggttgtgttcccttgaacataatacctcttacaacagcagccaaactaatggttgtcataccagactacaacacatataagaatacgtgtgatggtacaacatttacttatgcatcagcattgtgggaaatccaacaggttgtagatgcagatagtaaaattgttcagcttagtgaaattagtatggacaattcacctaatttagcatggcctcttattgtaacagctttaagggccaattctgctgtcaaattacagaataatgagcttagtcctgttgcactaagacaaatgtcttgtgctgccggtactacacaaactgcttgcactgatgacaatgcgttagcttactacaacacaacaaagggaggtaggtttgtacttgcactgttatccgatttacaggatttgaaatgggctagattccctaagagtgatggaactggtactatctatacagaactggaaccaccttgtaggtttgttacagacacacctaaaggtcctaaagtgaagtatctttacttcatcaaaggattaaacaacctaaatagaggtatggtacttggtagtttagctgccacagtacgtttacaagctggtaatgcaacagaagttcctgctaattcaactgtactttctttctgtgcttttgctgtagatgctgctaaagcttacaaagattatctagctagtgggggacaaccaatcactaattgtgttaagatgttgtgtacacacactggtactggtcaggcaataacagttacaccggaagccaatatggatcaagaatcctttggtggtgcatcgtgttgtctgtactgccgttgtcatatagatcatccaaatcctaaaggattttgtgacttaaaaggtaagtatgtacaaatacctacaacttgtgctaatgaccctgtgggttttacacttaaaaacacagtctgtaccgtctgcggtatgtggaaaggttatggttgtagttgtgatcaactccgcgaacccatgcttcagtcagctgatgcacaatcgtttttaaacgggtttgcggtgtaagtgcagcccgtcttacaccgtgcggcacaggcactagtactgatgtcgtatatagagcttttgacatctacaatgataaagtagctggttttgctaagttcctaaaaactaattgttgtcgcttccaagaaaaggacgaagatgacaatctcattgattcttactttgtagttaagagacacactttctctaactaccaacatgaagaaacaatttacaacctgcttaaggattgtccagctgttgctaaacatgacttctttaagtttagaatagacggtgacatggtaccacatatatcacgtcaacgtcttactaaatacacaatggcagacctcgtctatgctttaaggcattttgatgaaggtaattgtgacacattaaaagaaatacttgtcacatacaattgttgtgatgatgactacttcaataaaaaggactggtatgattttgtagaaaacccagatatattacgcgtatacgccaacttaggtgaacgtgtacgccaagctttgttaaaaacagtacagttctgtgatgccatgcgaaatgctggtattgttggtgtactgacattagataatcaagatctcaatggtaactggtatgactttggtgatttcatacaaaccacgccaggtagtggagttcctgttgtagactcttattattcattgctcatgcctatattaaccttgaccagggctttaactgcagagtcacatgttgacactgacttaacaaagccttacattaagtgggatttgttaaaatacgacttcacggaagagaggttaaaactctttgaccgttattttaaatactgggatcagacataccacccaaattgtgttaactgtttggatgacagatgcattctgcattgtgcaaactttaatgttctgttctctacagtgttcccacctacaagttttggaccactagtgagaaaaatatttgttgatggtgttccatttgtagtttcaactggataccacttcagagagctaggtgttgtacataatcaggatgtaaacttacatagctctagacttagttttaaggaattacttgtgtatgctgctgatcctgctatgcatgctgcttctggtaatctattactagataaacgcactacgtgcttttcagtagctgcacttactaacaatgttgcttttcaaactgtcaaacccggtaattttaacaaggacttctatgactttgctgtgtctaagggtttctttaaggaaggaagttctgttgaattaaaacacttcttctttgctcaggatggtaatgctgctatcagcgattatgactactatcgttataatctaccaacaatgtgtgatatcagacaactactatttgtagttgaagttgttgataagtactttgattgttacgatggtggctgtattaatgctaaccaagtcatcgtcaacaacctagacaaatcagctggttttccatttaataaatggggtaaggctagactttattatgattccatgagttatgaggatcaagatgcacttttcgcatatacaaaacgtaatgtcatccctactataactcaaatgaaccttaagtatgccattagtgcaaagaatagagctcgcaccgtagctggtgtctctatctgtagtactatgaccaatagacagtttcatcaaaaattactcaagtcaatagccgccactagaggagctactgtagtaattggaacaagcaaattctatggtggttggcacaacatgctcaaaactgtttatagtgatgtagaaaaccctcaccttatgggttgggattatcctaaatgtgatagagccatgcctaacatgcttagaattatggcctcacttgttcttgctcgcaaacatacaacgtgttgtagcttgtcacaccgtttctatagattagctaatgagtgtgctcaagtattgagtgaaatggtcatgtgtggcggttcactatatgttaaaccaggtggaacctcatcaggagatgccacaactgcttatgctaatagtgtgtttaacatttgtcaagctgtcacggccaatgttaatgcacttttatctactgatggtaacaaaattgccgataagtatgtccgcaatttacaacacagactttatgagtgtctctatagaaatagagatgttgacacagactttgtgaatgagttttacgcatatttgcgtaaacatttctcaatgatgatactctctgacgatgctgttgtgtgtttcaatagcacttatgcatctcaaggtctagtggctagcataaagaactttaagtcagttctttactatcaaaacaacgtttttatgtctgaagcaaaatgttggactgagactgaccttactaaaggacctcatgaattttgctctcaacatacaatgctagttaaacagggtgatgattatgtgtaccttccttacccagatccatcaagaatcctaggtgccggttgttttgtagatgatatcgtaaaaacagatggtacacttatgattgaacggttcgtgtctttagctatagatgcttacccacttactaaacatcctaatcaggagtatgctgatgtctttcatttgtacttacaatacatacgtaagctacatgatgagttaacaggacacatgttagacatgtattctgttatgcttactaatgataacacttcaaggtattgggaacctgagttttatgaggctatgtacacaccgcatacagtcttacaagctgttggtgcttgtgttctttgcaattcacagacttcattaagatgtggtgcttgcatacgtagaccattcttatgttgtaaatgctgttacgaccatgtcatctcaacatcacataaattagtcttgtctgttaatccgtatgtttgcaatgctccaggttgtgatgtcacagatgtgactcaactttacttaggaggtatgagctattactgtaagtcacataaaccacccattagttttccattgtgtgctaatggacaagtttttggtctctacaagaatacatgtgttggtagcgataatgttactgactttaatgcaattgcaacatgtgactggacaaatgctggtgattacattttagctaacacctgtactgaaagactcaagctttttgcagcagaaacgctcaaagctactgaggagacatttaaactgtcttatggtattgctactgtacgtgaagtgctgtctgacagagaattacatctttcatgggaagttggtaaacctagaccaccacttaaccgaaattatgtctttactggttatcgtgtaactaaaaacagtaaagtgcaaatcggagagtacacctttgaaaaaggtgactatggtgatgctgttgtttaccgaggtacaacaacttacaaactcaacgttggtgattattttgtgctgacatcacatacagtaatgccattaagtgcacctacactagtgccacaagagcactatgttagaattactggcttatacccaacactcaatatctcagatgagttttctagcaatgttgcaaattatcaaaaggttggtatgcaaaagtattctacactccagggaccacctggtactggtaaaagtcattttgctattggtctagctctctactacccttctgctcgcatagtatatacagcttgctctcatgcagctgttgatgcactatgtgagaaggcattaaaatatttgcccatagacaaatgtagtagaattatacctgcacgtgctcgtgtagagtgttttgataaattcaaggtgaattcaacattagaacagtatgtcttttgtactgtaaatgcattgcctgagacgacagcagatatagttgtctttgatgaaatttcaatggccacaaattatgatttgagtgttgtcaatgccagattacgtgctaagcactatgtgtacattggtgatcctgctcaattacctgcaccacgcacattactaactaagggtacactagaaccagaatatttcaattcagtgtgtagacttatgaaaactataggtccagacatgttcctcggaacttgtcgtagatgtcctgctgaaattgttgacactgtgagtgctttggtttatgataataagcttaaggcacataaagacaaatcagctcaatgctttaaaatgttctacaagggtgttatcacgcatgatgtttcatctgcaattaacaggccacaaataggcgtggtaagagaattccttacacgtaaccctgcttggagaaaagctgtctttatttcaccttacaattcccagaatgctgtagcctcaaagattttgggactaccaactcaaactgttgattcatcacagggctcagaatatgactatgtcatattcactcaaaccactgaaacagctcactcttgtaatgtaaacagattcaacgttgctattaccagagcaaaagtaggcatactttgcataatgtctgatagagacctttatgacaagttgcaatttacaagtcttgaaattccacgtaggaatgtggcaactttacaagctgaaaatgtaacaggactctttaaagattgtagtaaggtaatcactgggttacatcctacacaggcacctacacacttaagtgttgatactaaattcaaaactgaaggtttatgtgttgacatacctggcatacctaaggacatgacctatagaagattaatctctatgatgggtttcaaaatgaattaccaggttaatggttaccctaacatgtttatcacccgcgaagaagctataagacatgtacgtgcatggattggcttcgatgtcgaaggttgtcatgctactagagaagctgttggtaccaatttacctttacagctaggtttttctacaggtgttaacctagttgctgtacctacaggttatgttgatacacctaataatacagatttttccagagttagtgctaaaccaccgcctggagatcaatttaaacacctcataccacttatgtacaaaggacttccttggaatgtagtgcgtataaagattgtccaaatgttaagtgacacacttaaaaatctctctgacagagtcgtatttgtcttatgggcacatggctttgagttgacatctatgaagtattttgtgaagatcggacctgagcgcacatgttgtctatgtgatagacgtgctacatgcttttccactgcttcagacacttatgcctgttggcatcattctattggatttgattacgtctataatccgtttatgattgatgttcaacaatggggttttacaggtaacctacaaagcaaccatgatctgtattgtcaagtccatggtaatgcacatgtagctagttgtgatgcaatcatgactaggtgtctagctgtccacgagtgctttgttaagcgtgttgactggactattgaatatcctataatcggtgatgaactgaagattaatgcggcttgtagaaaggttcaacacatggttgttaaagctgcattattagcagacaaattcccagttcttcacgacattggtaaccctaaagctattaagtgtgtacctcaagctgatgtagaatggaagttctatgatgcacagccttgtagtgacaaagcttacaaaatagaagaactgttctattcttatgccacacattctgacaaattcacagatggtgtatgcctattttggaattgcaatgtcgatagatatcctgctaattccattgtttgtagatttgacactagagtgctatctaaccttaacttgcctggttgtgatggtggcagtttgtatgtaaataagcatgcattccacacaccagcttttgataaaagtgcttttgttaatctaaagcaacttccatttttctattactctgacagtccatgtgagtctcatggaaaacaagtagtgtcagatatagattatgtaccactaaagtctgctacgtgtataacacgttgcaatttaggtggtgctgtctgtagacatcatgctaatgagtacagattgtatctcgatgcttataacatgatgatctcagctggctttagcttgtgggtttacaaacaatttgatacctataacctctggaacacttttacaagacttcagagtttagaaaatgtggcttttaatgttgtaaataagggacactttgatggacaacagggtgaagtaccagtttctatcattaacaacactgtttacacaaaagttgatggtgttgatgtagaattgtttgagaacaaaaccacattacctgttaatgtagcatttgagctttgggctaagcgcaacattaaaccagtaccagaggtgaaaatactcaataatttgggtgtggacattgctgctaatactgtgatctgggactacaaaagagatgctccagcacatatatctactattggtgtttgttctatgactgacatagccaagaaaccaactgaaacgatttgtgcaccactcactgtcttttttgatggtagagttgatggtcaagtagacttatttagaaatgcccgtaatggtgttcttattacagaaggtagtgttaaaggtttacaaccatctgtaggtcccaaacaagctagtcttaatggagtcacattaattggagaagccgtaaaaacacagttcaattattacaagaaagtggatggtgttgtccaacaattacctgaaacttactttactcagagtagaaacttacaggaatttaagcccaggagtcaaatggaaattgatttcttagaacttgctatggatgaattcattgaacggtataaattagaaggctatgccttcgaacatatcgtttatggagattttagtcatagtcagttaggtggtttacatctactgattggactagctaaacgttttaaggaatcaccttttgaacttgaagattttattcctatggacagtacagttaaaaactacttcataacagatgcgcaaacaggttcatctaagtgtgtgtgttctgttattgatcttttacttgatgacttcgttgaaataataaagtcccaagatttatctgtagtttctaaggttgtcaaagtgactattgactatacagaaatctcatttatgctttggtgtaaagatggccatgtagaaacattttacccaaaattacaatctagtcaagcgtggcaaccgggtgttgctatgcctaatctttacaaaatgcaaagaatgctattagaaaagtgtgaccttcaaaattatggtgatagtgcaacattacctaaaggcataatgatgaatgtcgcaaaatatactcaactgtgtcaatatttaaacacactgacattagctgtaccctataatatgagagttatccattttggtgctggttctgataaaggagttgcaccaggtacagctgttttaagacaatggttgcctacaggtacgctgcttgtcgattcagatcttaatgactttgtctctgatgcagattcaactttgattggtgattgtgcaactgtacatacagctaataaatgggatctcattattagtgatatgtacgaccctaagactaagaatgtcacaaaagaaaacgactctaaagagggttttttcacttacatttgtgggtttatacaacaaaagctagctcttggaggttccgtggctataaagataacagaacattcttggaatgctgatctttataagctcatgggacacttcgcatggtggacagcctttgttactaatgtgaatgcgtcatcatctgaagcatttttaatcggatgtaactaccttggcaaaccacgcgaacaaatagatggttatgtcatgcatgcaaattacatattttggaggaatacaaatccaattcagctttcttcttattctttattcgacatgagtaaattcccccttaaattaaggggtactgctgttatgtctttaaaagaaggtcaaatcaatgatatgattctctctcttcttagtaaaggtagacttataattagagaaaacaacagagttgttatttctagtgatgttcttgttaacaactaaacgaacaatgtttgtttttcttgttttattgccactagtctctagtcagtgtgttaatcttacaaccagaactcaattaccccctgcatacactaattctttcacacgtggtgtttattaccctgacaaagttttcagatcctcagttttacattcaactcaggacttgttcttacctttcttttccaatgttacttggttccatgctatacatgtctctgggaccaatggtactaagaggtttgataaccctgtcctaccatttaatgatggtgtttactttgcttccactgagaagtctaacataataagaggctggatttttggtactactttagattcgaaaacccagtccctacttattgttaataacgctactaatgttgttatcaaagtctgtgaatttcaattttgtaacgatccatttttgggtgtttattaccacaaaaacaacaaaagttggatggaaagtgagttcagagtttattctagtgcgaataattgcacttttgaatacgtctctcagccttttcttatggaccttgaaggaaaacagggtaatttcaaaaatcttagggaatttgtgttcaagaatattgatggttacttcaagatatactctaagcacacgcctattaatttagtgcgtgatctccctcagggtttttcggctttagaaccattggtagatttgccaataggtattaacatcactaggtttcaaactttacttgctttacatagaagttatttaactcctggtgattcttcttcaggttggacagctggtgctgcagcttattatgtgggttatcttcaacctaggacttttctactgaagtacaatgaaaatggaaccattacagatgctgtagactgtgcacttgaccctctctcagaaacaaagtgtacgttgaaatccttcactgtagaaaaaggaatctatcaaacttctaactttagagtccaaccaacagaatctattgttagatttcctaacatcacaaacttgtgcccttttggtgaagtttttaacgccaccagatttgcatctgtttatgcttggaacaggaagagaatcagcaactgtgttgctgattattctgtcctgtataattccgcatcattttccacttttaagtgttatggagtgtctcctactaaattaaatgatctctgctttactaatgtctatgcagattcatttgtaattagaggtgatgaagtcagacaaatcgctccagggcaaactggaaagattgctgattataactacaaattaccagatgattttacaggctgcgttatagcttggaattctaacaatcttgattctaaggttggtggtaattataattacctgtacagattgtttaggaagtctaatctcaaaccttttgagagagatatttcaactgaaatctatcaggccggtagcacaccttgtaatggtgttgaaggttttaattgttactttcctctgcaatcatatggtttccaacccactaatggtgttggttaccaaccatacagagtagtagtactttcttttgaacttctacatgcaccagcaactgtttgtggacctaaaaagtctactaatttggttaagaacaagtgtgtcaatttcaacttcaatggtttaacaggcacaggtgttcttactgagtctaacaaaaagtttctgcctttccaacaatttggcagagacattgctgacactactgatgctgttcgtgatccacaaacacttgagattcttgacattacaccatgttcttttggtggtgtcagtgttataacaccaggaacaaatacttctaaccaggttgctgttctttatcaggatgttaactgcacagaagtccctgttgctattcatgcagatcaacttactcctacttggcgtgtttattctacaggttctaatgtttttcaaacacgtgcaggctgtttaataggggctgaacatgtcaacaactcatatgagtgtgacatacccattggtgcaggtatatgcgctagttatcagactcagactaattctcctcggagagcaagaagtgtagctagtcaatccatcattgcctacactatgtcacttggtgcagaaaattcagttgcttactctaataactctattgccatacccacaaattttactattagcgttaccacagaaattctaccagtgtctatgaccaagacatcagtagattgtacaatgtacatttgtggtgattcaactgaatgcagcaatcttttgttgcaatatggcagtttttgtacacaattaaaccgtgctttaactggaatagctgttgaacaagacaaaaacacccaagaagtttttgcacaagtcaaacaaatttacaagacaccaccaattaaagattttggcggttttaattttagccagatactgccagatccatcaaaaccaagcaagaggtcatttattgaagatctactgttcaacaaagtgacacttgcagatgctggcttcatcaaacaatatggtgattgccttggtgatattgctgctagagacctcatttgtgcacaaaagtttaacggccttactgttttgccacctttgctcacagatgaaatgattgctcaatacacttctgcactgttagcaggtacaatcacttctggttggacttttggtgcaggtgctgcattacaaataccatttgctatgcaaatggcttataggtttaatggtattggagttacacagaatgttctctatgagaaccaaaaattgattgccaaccaatttaatagtgctattggcaaaattcaagactcactttcttccacagcaagtgcacttggaaaacttcaagatgtggtcaaccaaaatgcacaagctttaaacacgcttgttaaacaacttagctccaattttggtgcaatttcaagtgttttaaacgacatcctttcacgtcttgacaaagttgaggctgaagtgcaaattgataggttgatcacaggcagacttcaaagtttgcagacatatgtgactcaacaattaattagagctgcagaaatcagagcttctgctaatcttgctgctactaaaatgtcagagtgtgtacttggacaatcaaaaagagttgacttttgcggaaagggctatcatcttatgtcatttcctcagtcagcacctcatggtgtcgtctttttgcatgtgacttatgtccctgcacaagaaaagaacttcacaactgctcctgccatttgtcatgatggaaaagcacactttcctcgtgaaggtgtctttgtttcaaatggcacacactggtttgtaacacaaaggaatttttatgaaccacaaatcattactacagacaacacatttgtgtctggtaactgtgatgttgtaataggaattgtcaacaacacagtttatgatcctttgcaacctgaattagactcattcaaggaggagcttgataaatacttcaagaaccatacctcaccagatgttgatttaggtgacatctctggcattaatgcttcagttgtaaacattcagaaagaaatcgaccgcctcaatgaggttgccaagaatttaaatgaatctctcatcgatctccaagaacttggaaagtatgagcagtatataaaatggccatggtacatttggctaggttttatagctggcttgattgccatagtaatggtgacaattatgctttgctgtatgaccagttgctgtagttgtctcaagggctgttgttcttgtggatcctgctgcaaatttgacgaggacgactctgagccagtgctcaaaggagtcaaattacattacacataaacgaacttatggatttgtttatgagaatcttcacaattggaactgtaactttgaagcaaggtgaaatcaaggatgctactccttcagattttgttagagctactgcaacgataccgatacaagcatcacttcctttcggatggcttattgttggcgttgcacttcttgctgtttttcagagcgcttccaaaatcataaccctcaaaaagagatggcaactagcactctccaagggtgttcactttgtttgcaacttgctgttgttgtttgtaacagtttactcacatcttttgcttgttgctgctggccttgaagccccttttctctatctttatgctttagtctacttcttgcagagtataaactttgtacgcataataatgaggctttggctttgctggaaatgccgttccaaaaacccattactttatgatgccaactattttctttgctggcatactaattgttacgactattgtataccttacaatagtgtaacttcttcaattgtcattacttcaggtgatggcacaacaagtcctatttctgaacatgactaccagattggtggttatactgaaaaatgggaatctggagtaaaagactgtgttgtattacacagttacttcacttcagactattaccagctgtactcaactcaattgagtacagacactggtgttgaacatgttaccttcttcatctacaataaaatcgttgatgagcctgaagaacatgtccaaattcacacaatcgacgtttcatccggagttgttaatccagtaatggaaccaatttatgatgaaccgacgacgactactagcgtgcctttgtaagcacaagctgatgagtacgaacttatggcagattccaacggtactattaccgttgaggagctgaaaaagctccttgaacaatggaacctagtaataggtttcctattccttacatggatttgcctgctgcaatttgcctatgccaacaggaataggtttttgtacatcattaagttgattttcctctggctgttatggccagtaactttagcttgttttgtgcttgctgctgtttacagaataaattggatcaccggtggaattgctattgcaatggcttgtcttgtaggattgatgtggctaagctacttcattgcttctttcagactgtttgcgcgtacgcgttccatgtggtcattcaatccagaaactaacattcttctcaacgtgccactccatggaactattctgactagaccgcttctagaaagtgaactcgtaatcggagctgttatccttcgtggacatcttcgtattgctggacatcatctaggacgctgtgacatcaaggatctacctaaagaaatcactgttgctacatcacgaacgctttcttattacaaattgggagcttcacagcgtgtagcaggtgattcaggttttgctgcatatagtcgctacaggattggcaactataaattaaacacagaccattccagtagcagtgacaatattgctttgcttgtacagtaaacgaacatgaaaattattcttttcttggcactgataacactcgctacttgtgagctttatcactaccaagagtgtgttagaggtacaacagtacttttaaaagaaccttgctcgtcgggaacatacgagggcaattcaccatttcatcctctagctgataacaaatttgcactgacttgctttagcactcaatttgcttttgcttgtcctgacggcgtaaaacacgtctatcagttacgtgccagatcagtttcacctaaactgttcatcagacaagaggaagttcaagaactttactctccaatttttcttattgttgcggcaatagtgtttataacactttgcttcacactcaaaagaaagacagaatgattgaactttcattaattgacttctatttgtgctttttagcctttctgctattccttgttttaattatgcttattatcttttggttctcacttgaactgcaagatcataatgaaacttgtcacgcctaagacgttcgtgttgttttagatttcatctaaacgaacaaactaaaatgtctgataatggacctcaaaatcagcgaaatgcacctcgcattacgtttggtggaccatcagattcaactggcagtaaccagaatggagaacgaagtggtgcgcgatcaaaacaacgccgcccgcaaggtttacccaataatactgcgtcttggttcaccgctctcactcaacatggcaaggaagatttaaaattccctcgaggacaaggcgttccaattaacaccaatagcagtccagatgaccaaattggctactaccgccgcgccacaagacgaattcgtggtggtgatggtaaaatgaaagatctcagtccaagatggtatttctactatctaggaactgggccagaagctggacttccttatggtgctaacaaagatggcatcatatgggttgcaactgagggagccttgaatacaccaaaagatcacattggcaccagaaatcctgctaacaatgctgcaatcgtgctacaacttcctcaaggaacaacattaccaaaaggtttttacgcagaagggtctagaggtggaagtcaagcctcttctagatcatcatcacgtagtcgcaacagttcaagaaattcaactccaggttcaagtagaggaacttctcctgctagaatggctggaaatggaggtgatgctgctcttgctttgttactacttgacagattgaaccagcttgagagcaaaatgtctggtaaaggccaacaacaacaaggccaaactgtcactaagaaatctgctgctgaggcttctaagaagcctagacaaaaacgtactgccactaaagcatacaatgtaacacaagctttcggcagacgtggtccagaacaaactcaaggaaattttggggatcaggaactaatcagacaaggaactgattacaaacattggccgcaaattgcacaatttgctccttctgcttcagcgttctttggaatgtcgagaattggaatggaagtcacaccttcgggaacatggttgacctatacaggtgccatcaaattggatgacaaagatccaaatttcaaagatcaagtcattttgctgaataagcatattgacgcatacaaaacattcccaccaacagagcctaaaaaggacaaaaagaagaaggctgatgaaactcaagccttaccgcagagacagaagaaacagcaaactgtgactcttcttcctgctgcagatttggatgatttctccaaacaattgcaacaatccatgagcagtgctgactcaactcaggcctaaactcatgcagaccacacaaggcagatgggctatataaacgttttcgcttttccgtttacgatatatagtctactcttgtgcagaatgaattctcgtaactacatagcacaagtagatgtagttaactttaatctcacatagcaatctttaatcagtgtgtaacattagggaggacttgaaagagccaccacattttcaccgaggccacgcggagtacgatcgagtgtacagtgaacaatgctagggagagctgcctatatggaagagccctaatgtgtaaaattaattttagtagtgctatccccatgtgattttaatagcttcttaggagaatgacaaaaaaaaacaaaaaaaa

SEQ ID NO: 44 - DNA, 29968 bp, Artificial Sequence
  Synthesis optimized
caaatataacgaaaggctcagtcgaaagactgggcctttcgttttatctgttgtttgtcgtaatacgactcactatagggattaaaggtttataccttcccaggtaacaaaccaaccaactttcgatctcttgtagatctgttctctaaacgaactttaaaatctgtgtggctgtcactcggctgcatgcttagtgcactcacgcagtataattaataactaattactgtcgttgacaggacacgagtaactcgtctatcttctgcaggctgcttacggtttcgtccgtgttgcagccgatcatcagcacatctaggtttcgtccgggtgtgaccgaaaggtaagatggagagccttgtccctggtttcaacgagaaaacacacgtccaactcagtttgcctgttttacaggttcgcgacgtgttagtacgtggttttggagattcagtggaagaagtcttatcagaggcacgtcaacatcttaaagatggcacttgtggcttagtagaagttgaaaaaggcgttttgcctcaacttgaacagccctatgtgttcatcaaacgttctgatgctagaactgcacctcatggtcatgttatggttgagctggtagcagaattagaaggtattcagtacggtcgtagtggtgagacattaggtgttttagttcctcatgtgggcgaaataccagtggcttaccgcaaagttcttcttagaaagaacggtaataaaggagctggtggccatagttacggcgctgatttaaagtcatttgacttaggcgacgagcttggcactgatccttatgaagatttccaagaaaactggaacactaaacatagcagtggtgttacccgtgaactcatgcgtgagttaaatggaggtgcatacactcgctatgtcgataacaacttctgtggacctgatggttaccctcttgagtgcattaaagaccttctagcacgtgctggtaaagcttcatgcactttgtccgaacaactggactttattgacactaagaggggtgtatactgctgccgtgaacatgagcatgaaattgcttggtacacggaacgttctgaaaagagctatgaattgcagacaccttttgaaattaaactggcaaagaaatttgacaccttcaatggggaatgtccaaattttgtatttcccctcaattccataatcaagactattcaaccaagggttgaaaagaaaaagcttgatggctttatgggtagaattcgatctgtctatccagttgcgtcaccaaatgaatgcaaccaaatgtgcctttcaactctcatgaagtgtgatcattgtggtgaaacttcatggcagacgggcgattttgttaaagccacttgcgaattttgtggcactgagaatttgactaaagaaggtgccactacttgtggttacttaccccaaaatgctgttgttaaaatttactgtccagcatgtcacaattcagaagtaggacctgagcatagtcttgccgaataccataatgaatctggcttgaaaaccattcttcgtaagggtggtcgcactattgcttttggaggatgtgtgttctcttatgttggttgccataacaagtgtgcttattgggttccacgtgcttcagctaacataggttgtaaccatacaggtgttgttggagaaggttccgaaggtcttaatgacaaccttcttgaaatactccaaaaagagaaagtcaacatcaatattgttggtgactttaaacttaatgaagagatcgccattattttggcatctttttctgcttccacaagtgcttttgtggaaactgtgaaaggtttggattataaagcattcaaacagattgttgaatcctgtggtaattttaaggttacaaagggaaaagctaaaaaaggtgcctggaatattggtgaacagaaatcaatactgagtcctctttatgcatttgcatcagaggctgctcgtgttgtacgatcaattttctcccgcactcttgaaactgctcaaaattctgtgcgtgttttacagaaggccgctataacaatactagatggaatttcacagtattcactgagactcattgatgctatgatgttcacatctgatttggctactaacaatctagttgtaatggcctacattacaggtggtgttgttcagttgacttcgcagtggctaactaacatctttggcactgtttatgaaaaactcaaacccgtccttgattggcttgaagagaagtttaaggaaggtgtagagtttcttagagacggttgggagattgttaaattcatctcaacctgtgcttgtgaaattgtcggtggacaaattgtcacctgtgctaaggaaattaaggagagtgttcagacattctttaagcttgtaaacaagtttttggctttgtgtgctgactctatcattattggtggagctaaacttaaagccttgaatttaggtgaaacatttgtcacgcactcaaagggattgtacagaaagtgtgttaaatccagagaagaaactggcctactcatgcctctaaaagccccaaaagaaattatcttcttagagggagaaacacttcccacagaagtgttaacagaggaagttgtcttgaaaactggtgatttacaaccattagaacaacctactagtgaagctgttgaagctccattggttggtacaccagtttgtattaacgggcttatgttgctcgaaatcaaagacacagaaaagtactgtgcccttgcacctaatatgatggtaacaaacaataccttcacactcaaaggcggtgcaccaacaaaggttacttttggtgatgacactgtgatagaagtgcaaggttacaagagtgtgaatatcacttttgaacttgatgaaaggattgataaagtacttaatgagaagtgctctgcctatacagttgaactcggtacagaagtaaatgagttcgcctgtgttgtggcagatgctgtcataaaaactttgcaaccagtatctgaattacttacaccactgggcattgatttagatgagtggagtatggctacatactacttatttgatgagtctggtgagtttaaattggcttcacatatgtattgttctttctaccctccagatgaggatgaagaagaaggtgattgtgaagaagaagagtttgagccatcaactcaatatgagtatggtactgaagatgattaccaaggtaaacctttggaatttggtgccacttctgctgctttacaacctgaagaagaacaagaagaagattggttagatgatgatagtcaacaaactgttggtcaacaagacggcagtgaggacaatcagacaactactattcaaacaattgttgaggttcaacctcaattagagatggaacttacaccagttgttcagactattgaagtgaatagttttagtggttatcttaaacttactgacaatgtatacatcaagaatgcagacattgtggaagaagctaaaaaggtaaaaccaacagtggttgttaatgcagccaatgtttaccttaaacatggaggaggtgttgcaggagccttaaataaggctactaacaatgccatgcaagttgaatctgatgattacatagctactaatggaccacttaaagtgggtggtagttgtgttttaagcggacacaatcttgctaaacactgtttacatgttgtcggcccaaatgttaacaaaggtgaagatattcaacttcttaagagtgcttatgaaaattttaaccagcacgaagttctacttgcaccattattatcagctggtatttttggtgctgaccctatacattctttaagagtttgtgtagatactgttcgcacaaatgtctacttagctgtctttgataaaaatctctatgacaaacttgtttcaagctttttggaaatgaagagtgaaaagcaagttgaacaaaagatcgctgagattcctaaagaggaagttaagccatttataactgaaagtaaaccttcagttgaacagagaaaacaagatgataagaagatcaaagcttgtgttgaagaagttacaacaactctggaagaaactaagttcctcacagaaaacttgctcctttatatcgacattaatggcaatcttcatccagattctgccactcttgttagtgacattgacatcactttcttaaagaaagatgctccatatatagtgggtgatgttgttcaagagggtgttttaactgctgtggttatacctactaaaaaggctggtggcactactgaaatgctagcgaaagctttgagaaaagtgccaacagacaattatataaccacttacccgggtcagggtttaaatggttacactgtagaggaggcaaagacagtgcttaaaaagtgtaaaagtgccttttacattctaccatctattatctctaatgagaagcaagaaattcttggaactgtttcttggaatttgcgagaaatgcttgcacatgcagaagaaacacgcaaattaatgcctgtctgtgtggaaactaaagccatagtttcaactatacagcgtaaatataagggtatcaagatacaagagggtgtggttgattatggtgctagattttacttttacaccagtaaaacaactgtagcgtcacttatcaacacacttaacgatctaaatgaaactcttgttacaatgccacttggctatgtaacacatggcttaaatttggaagaagctgctcggtatatgagatctctcaaagtgccagctacagtttctgtttcttcacctgatgctgttacagcgtataatggttatcttacttcttcttctaaaacacctgaagaacattttattgaaaccatctcacttgctggttcctataaagattggtcctattctggacaatctacacaactaggtatagaatttcttaagagaggtgataaaagtgtatattacacgtccaatcctaccacattccacctagatggtgaagttatcacctttgacaatcttaagacacttctttctttgagagaagtgaggactattaaggtgtttacaacagtagacaacattaacctccacacgcaagttgtggacatgtcaatgacatatggacaacagtttggtccaacttatttggatggagctgatgttactaagataaaacctcataactcacatgaaggtaaaacattttacgttttgcctaatgatgacactctacgtgttgaggcttttgagtactaccacacaactgatcctagttttctgggtaggtacatgtcagcattaaatcacactaaaaagtggaaatacccacaagttaatggtttaacttcgattaaatgggcagataacaactgttatcttgccactgcattgttaacactccaacaaatagagttgaagtttaatccacctgctctacaagatgcttattacagagcaagggctggtgaagctgctaacttttgtgcacttatcttagcctactgtaataagacagtaggtgagttaggtgatgttagagaaacaatgagttacttgtttcaacatgccaatttagattcttgcaaaagagtcttgaacgtggtgtgtaaaacttgtggacaacagcagacaacccttaagggtgtagaagctgttatgtacatgggcacactttcttatgaacaattcaagaaaggtgttcagataccttgtacgtgtggtaaacaagctacaaaatatctagtacaacaggagtcaccttttgttatgatgtcagcaccacctgctcagtatgaacttaagcatggtacatttacttgtgctagtgagtacactggtaattaccagtgtggtcactataagcatataacttctaaggaaactttgtattgcatagacggtgctttacttacaaagtcctcagaatacaaaggtcctattacggatgttttctacaaagaaaacagttacacaacaaccataaaaccagttacttataagttggatggtgttgtttgtacagaaattgaccctaagttggacaattattataagaaggacaactcttatttcacagagcaaccaattgatcttgtaccaaaccaaccatatccaaacgcaagcttcgataattttaagttcgtatgcgataatatcaaatttgctgatgatctcaaccagttaactggttataagaaacctgcttcaagagagcttaaagttacatttttccctgacttaaatggtgatgtggtggctattgattataaacactacacaccctcttttaagaaaggagctaaattgttacataagcctattgtttggcatgttaacaatgcaactaataaagccacgtataaaccaaatacctggtgtatacgttgtctttggagcacaaaaccagttgaaacatcaaattcgtttgatgtactgaagtcagaggacgcgcagggaatggataatcttgcatgtgaagatctaaaaccagtctctgaagaagtagtggaaaatcctaccatacagaaagacgttcttgagtgtaatgtgaaaactaccgaagttgtaggagacattatacttaaaccagcaaataatagtttgaagatcacagaagaggttggccacacagatctaatggctgcttatgtagacaattctagtcttactattaagaaacctaatgaactctctagagtattaggtttgaaaacccttgctactcatggtttagctgctgttaatagtgtcccttgggatactatagctaattatgctaagccttttcttaacaaagttgttagtacaactactaacatagttacacggtgtcttaatcgtgtttgtactaattatatgccttacttctttactttattgctacaattgtgtacttttactagaagtacaaattctagaatcaaggcatctatgccgactactatagcaaagaatactgttaagagtgtcggtaaattttgtctagaggcttcatttaattatctcaagtcacctaacttttctaagctgataaacattatcatctggtttttgctattaagtgtttgcctaggttctttaatctactcaaccgctgctttaggtgttttaatgtctaatttaggcatgccttcttactgtactggttacagagaaggctatttgaactctactaatgtcactattgcaacctactgtactggatctataccttgtagtgtttgtcttagtggtttagattctttagacacctatccttctcttgaaactatacagattaccatttcatctttcaaatgggatttaactgcttttggcttagttgcagagtggtttttggcatatattcttttcactaggtttttctatgtacttggattggctgcaatcatgcaattgtttttcagctattttgcagtccattttattagtaactcttggcttatgtggcttataattaatcttgtgcagatggccccgatttcagctatggttagaatgtacatcttctttgcctcattttattatgtgtggaaaagttatgtgcatgttgtagacggttgtaattcatcaacttgtatgatgtgttacaaacgtaatagagcaacaagagtcgaatgtacaactattgttaatggtgttagaaggtccttttatgtctatgctaatggaggtaaaggcttttgcaaactacacaattggaattgtgttaattgtgatacattctgtgctggtagtacatttattagtgatgaagttgcgagagacttgtcactacagtttaaaagaccaataaatcctactgaccaatcttcttacatcgttgatagtgttacagtgaagaatggttccatccatctttactttgataaagctggtcaaaagacttatgaaagacattctctctctcattttgttaacttagacaacctgagagctaataacactaaaggttcattgcctattaatgttatcgttttcgacggtaaatcaaaatgtgaagaatcatctgcaaaatcagcgtctgtttactacagtcagcttatgtgtcaacctatactgttactagatcaggcattagtgtctgatgttggtgatagtgcggaagttgcagttaaaatgtttgatgcttacgttaatacgttttcatcaacttttaacgtaccaatggaaaaactcaaaacactagttgcaactgcagaagctgaacttgcaaagaatgtgtccttagacaatgtcttatctacgtttatttcagcagctcggcaagggtttgttgattcagatgtagaaactaaagatgttgttgaatgtcttaaattgtcacatcaatctgacatagaagttactggcgatagttgtaataactatatgctcacctataacaaagttgaaaacatgacaccccgtgaccttggtgcttgtattgactgtagtgctagacatattaatgcgcaggtagcaaaaagtcacaacattgctttgatatggaacgttaaagatttcatgtcattgtctgaacaactacgaaaacaaatacgtagtgctgctaaaaagaataacttacccttcaagttgacatgtgcaactactagacaagttgttaatgttgtaacaacaaagatagcacttaagggtggtaaaattgtgaataactggttgaagcagcttattaaagttacacttgtgttcctttttgttgctgctattttctatctgataacacctgttcatgtcatgtctaaacatactgacttttcaagtgaaatcataggatacaaggctattgatggtggtgtcactcgtgacatagcatctacagatacttgttttgctaacaaacatgctgattttgacacatggtttagccagcgtggtggtagttatactaatgacaaagcttgcccattgattgctgcagtcataacaagagaagtgggttttgtcgttcctggtttgcctggaacgatattacgcacaactaatggtgactttttgcatttcttacctagagtttttagtgcagttggtaacatctgttacacaccatcaaaacttatagagtacactgactttgcaacatcagcttgtgttttggctgctgaatgtacaatttttaaagacgcttctggtaagccagtaccatattgttatgataccaatgtactagaaggttctgttgcttatgaaagtttacgccctgacacacgttatgtgctcatggatggctctattattcaatttcctaacacctaccttgaaggttctgtaagagtggtaacaacttttgattctgagtactgtaggcacggcacttgtgaaagatcagaagctggtgtttgtgtatctactagtggtagatgggtacttaacaacgattattacagatctttaccaggagttttctgtggtgtagatgctgtaaatttgcttactaacatgtttacaccactaattcaacctattggtgctttggacatatcagcatctatagtagctggtggtattgtagctatcgtagtaacatgccttgcctactattttatgaggtttagacgtgcttttggtgaatacagtcatgtagttgcctttaatactctcctattccttatgtcattcactgtactctgtttaacaccagtttactcattcttacctggtgtttattctgttatttacctgtacttgacattttatctgactaatgatgtttcttttctcgcacatattcagtggatggttatgttcacacctttagtacctttctggataacaattgcttacatcatttgtatttccacaaagcatttctattggttctttagtaattacctaaagagacgtgtagtctttaatggtgtttcctttagtacttttgaagaagctgcgctgtgcacctttttgttaaataaggagatgtatctaaagttgcgtagtgatgtgctattacctcttacgcaatataatagatacttagctctttataacaagtacaagtatttcagtggagcaatggatacaactagctacagagaagctgcttgttgtcatctcgcaaaggctctcaatgacttcagtaactcaggttctgatgttctttaccaaccaccacaaacctctatcacctcagctgttttgcagagtggttttagaaaaatggcattcccatctggtaaagttgagggttgtatggtacaagtaacttgtggtacaactacacttaacggtctttggcttgatgacgtagtttactgtccaagacatgtgatctgcacctctgaagatatgcttaaccctaattatgaagatctactcatccgtaagtctaatcataacttcttggtacaggctggtaatgttcaactcagggttattggacattctatgcaaaattgtgtacttaagcttaaggttgatacagccaatcctaagacacctaagtataagtttgttcgcattcaaccaggacagactttttcagtgttagcttgttacaatggttcaccatctggtgtttaccaatgtgctatgaggcccaatttcactattaagggttcattccttaatggttcatgtggtagtgttggttttaacatagattatgactgtgtctctttttgttacatgcaccatatggaattaccaactggagttcatgctggcacagacttagaaggtaacttttatggaccttttgttgacaggcaaacagcacaagcagctggtacagatacaactattacagttaatgttcttgcttggttgtacgctgctgttataaatggagacaggtggtttctcaatcgatttaccacaactcttaatgactttaaccttgtggctatgaagtacaattatgaacctctaacacaagaccatgttgacatactaggacctctttctgctcaaactggaattgccgttttagatatgtgtgcttcattaaaagaacttctgcaaaatggtatgaatggacgtaccatattgggtagtgctttattagaagatgagtttacaccttttgatgttgttagacaatgctcaggtgttactttccaaagtgcagtgaaaagaacaatcaagggtacacaccactggttgttactcacaattttgacttcacttttagttttagtccagagtactcaatggtctttgttctttttcttctacgaaaatgcctttttaccttttgctatgggtattattgctatgtctgcttttgcaatgatgtttgtcaaacataagcatgcatttctctgtttgtttttgttaccttctcttgccactgtagcttactttaatatggtctacatgcctgctagttgggtgatgcgtattatgacatggttggatatggttgatactagtttgtctggttttaagctaaaagactgtgttatgtatgcatcagctgtagtgttactaatccttatgacagcaagaactgtgtatgatgatggtgctaggagagtgtggacacttatgaatgtcttgacactcgtttataaagtttactatggcaacgctttagatcaagccatttccatgtgggctcttataatctctgttacttctaactactcaggtgtagttacaactgtcatgtttttggccagaggtattgtttttatgtgtgttgagtattgccctattttcttcataactggtaatacacttcagtgtataatgctagtctattgtttcttaggctatttttgtacttgttacttcggcctcttttgtttactcaaccgctactttagactgactcttggtgtttatgattacttagtgtctacacaggagtttagatatatgaattcacagggactactcccacccaagaatagcatagatgccttcaaactcaacattaaattgttgggtgttggtggcaaaccttgtatcaaagtagccactgtacagtctaaaatgtcagatgtaaagtgcacatcagtagtcttactctcagttttgcaacaactcagagtagaatcatcatctaaattgtgggctcaatgtgtccagttacacaatgacattctcttagctaaagatactactgaagcctttgaaaaaatggtttcactactttctgttttgctttccatgcagggtgctgtagacataaacaagctttgtgaagaaatgctggacaacagggcaaccttacaagctatagcctcagagtttagttcccttccatcatatgcagcttttgctactgctcaagaagcttatgagcaggctgttgctaatggtgattctgaagttgttcttaaaaagttgaagaagtctttgaatgtggctaaatctgaatttgaccgtgatgcagccatgcaacgtaagttggaaaagatggctgatcaagctatgacccaaatgtataaacaggctagatctgaggacaagagggcaaaagttactagtgctatgcagacaatgcttttcactatgcttagaaagttggataatgatgcactcaacaacattatcaacaatgcaagagatggttgtgttcccttgaacataatacctcttacaacagcagccaaactaatggttgtcataccagactacaacacatataagaatacgtgtgatggtacaacatttacttatgcatcagcattgtgggaaatccaacaggttgtagatgcagatagtaaaattgttcagcttagtgaaattagtatggacaattcacctaatttagcatggcctcttattgtaacagctttaagggccaattctgctgtcaaattacagaataatgagcttagtcctgttgcactaagacaaatgtcttgtgctgccggtactacacaaactgcttgcactgatgacaatgcgttagcttactacaacacaacaaagggaggtaggtttgtacttgcactgttatccgatttacaggatttgaaatgggctagattccctaagagtgatggaactggtactatctatacagaactggaaccaccttgtaggtttgttacagacacacctaaaggtcctaaagtgaagtatctttacttcatcaaaggattaaacaacctaaatagaggtatggtacttggtagtttagctgccacagtacgtttacaagctggtaatgcaacagaagttcctgctaattcaactgtactttctttctgtgcttttgctgtagatgctgctaaagcttacaaagattatctagctagtgggggacaaccaatcactaattgtgttaagatgttgtgtacacacactggtactggtcaggcaataacagttacaccggaagccaatatggatcaagaatcctttggtggtgcatcgtgttgtctgtactgccgttgtcatatagatcatccaaatcctaaaggattttgtgacttaaaaggtaagtatgtacaaatacctacaacttgtgctaatgaccctgtgggttttacacttaaaaacacagtctgtaccgtctgcggtatgtggaaaggttatggttgtagttgtgatcaactccgcgaacccatgcttcagtcagctgatgcacaatcgtttttaaacgggtttgcggtgtaagtgcagcccgtcttacaccgtgcggcacaggcactagtactgatgtcgtatatagagcttttgacatctacaatgataaagtagctggttttgctaagttcctaaaaactaattgttgtcgcttccaagaaaaggacgaagatgacaatctcattgattcttactttgtagttaagagacacactttctctaactaccaacatgaagaaacaatttacaacctgcttaaggattgtccagctgttgctaaacatgacttctttaagtttagaatagacggtgacatggtaccacatatatcacgtcaacgtcttactaaatacacaatggcagacctcgtctatgctttaaggcattttgatgaaggtaattgtgacacattaaaagaaatacttgtcacatacaattgttgtgatgatgactacttcaataaaaaggactggtatgattttgtagaaaacccagatatattacgcgtatacgccaacttaggtgaacgtgtacgccaagctttgttaaaaacagtacagttctgtgatgccatgcgaaatgctggtattgttggtgtactgacattagataatcaagatctcaatggtaactggtatgactttggtgatttcatacaaaccacgccaggtagtggagttcctgttgtagactcttattattcattgctcatgcctatattaaccttgaccagggctttaactgcagagtcacatgttgacactgacttaacaaagccttacattaagtgggatttgttaaaatacgacttcacggaagagaggttaaaactctttgaccgttattttaaatactgggatcagacataccacccaaattgtgttaactgtttggatgacagatgcattctgcattgtgcaaactttaatgttctgttctctacagtgttcccacctacaagttttggaccactagtgagaaaaatatttgttgatggtgttccatttgtagtttcaactggataccacttcagagagctaggtgttgtacataatcaggatgtaaacttacatagctctagacttagttttaaggaattacttgtgtatgctgctgatcctgctatgcatgctgcttctggtaatctattactagataaacgcactacgtgcttttcagtagctgcacttactaacaatgttgcttttcaaactgtcaaacccggtaattttaacaaggacttctatgactttgctgtgtctaagggtttctttaaggaaggaagttctgttgaattaaaacacttcttctttgctcaggatggtaatgctgctatcagcgattatgactactatcgttataatctaccaacaatgtgtgatatcagacaactactatttgtagttgaagttgttgataagtactttgattgttacgatggtggctgtattaatgctaaccaagtcatcgtcaacaacctagacaaatcagctggttttccatttaataaatggggtaaggctagactttattatgattccatgagttatgaggatcaagatgcacttttcgcatatacaaaacgtaatgtcatccctactataactcaaatgaaccttaagtatgccattagtgcaaagaatagagctcgcaccgtagctggtgtctctatctgtagtactatgaccaatagacagtttcatcaaaaattactcaagtcaatagccgccactagaggagctactgtagtaattggaacaagcaaattctatggtggttggcacaacatgctcaaaactgtttatagtgatgtagaaaaccctcaccttatgggttgggattatcctaaatgtgatagagccatgcctaacatgcttagaattatggcctcacttgttcttgctcgcaaacatacaacgtgttgtagcttgtcacaccgtttctatagattagctaatgagtgtgctcaagtattgagtgaaatggtcatgtgtggcggttcactatatgttaaaccaggtggaacctcatcaggagatgccacaactgcttatgctaatagtgtgtttaacatttgtcaagctgtcacggccaatgttaatgcacttttatctactgatggtaacaaaattgccgataagtatgtccgcaatttacaacacagactttatgagtgtctctatagaaatagagatgttgacacagactttgtgaatgagttttacgcatatttgcgtaaacatttctcaatgatgatactctctgacgatgctgttgtgtgtttcaatagcacttatgcatctcaaggtctagtggctagcataaagaactttaagtcagttctttactatcaaaacaacgtttttatgtctgaagcaaaatgttggactgagactgaccttactaaaggacctcatgaattttgctctcaacatacaatgctagttaaacagggtgatgattatgtgtaccttccttacccagatccatcaagaatcctaggtgccggttgttttgtagatgatatcgtaaaaacagatggtacacttatgattgaacggttcgtgtctttagctatagatgcttacccacttactaaacatcctaatcaggagtatgctgatgtctttcatttgtacttacaatacatacgtaagctacatgatgagttaacaggacacatgttagacatgtattctgttatgcttactaatgataacacttcaaggtattgggaacctgagttttatgaggctatgtacacaccgcatacagtcttacaagctgttggtgcttgtgttctttgcaattcacagacttcattaagatgtggtgcttgcatacgtagaccattcttatgttgtaaatgctgttacgaccatgtcatctcaacatcacataaattagtcttgtctgttaatccgtatgtttgcaatgctccaggttgtgatgtcacagatgtgactcaactttacttaggaggtatgagctattactgtaagtcacataaaccacccattagttttccattgtgtgctaatggacaagtttttggtctctacaagaatacatgtgttggtagcgataatgttactgactttaatgcaattgcaacatgtgactggacaaatgctggtgattacattttagctaacacctgtactgaaagactcaagctttttgcagcagaaacgctcaaagctactgaggagacatttaaactgtcttatggtattgctactgtacgtgaagtgctgtctgacagagaattacatctttcatgggaagttggtaaacctagaccaccacttaaccgaaattatgtctttactggttatcgtgtaactaaaaacagtaaagtgcaaatcggagagtacacctttgaaaaaggtgactatggtgatgctgttgtttaccgaggtacaacaacttacaaactcaacgttggtgattattttgtgctgacatcacatacagtaatgccattaagtgcacctacactagtgccacaagagcactatgttagaattactggcttatacccaacactcaatatctcagatgagttttctagcaatgttgcaaattatcaaaaggttggtatgcaaaagtattctacactccagggaccacctggtactggtaaaagtcattttgctattggtctagctctctactacccttctgctcgcatagtatatacagcttgctctcatgcagctgttgatgcactatgtgagaaggcattaaaatatttgcccatagacaaatgtagtagaattatacctgcacgtgctcgtgtagagtgttttgataaattcaaggtgaattcaacattagaacagtatgtcttttgtactgtaaatgcattgcctgagacgacagcagatatagttgtctttgatgaaatttcaatggccacaaattatgatttgagtgttgtcaatgccagattacgtgctaagcactatgtgtacattggtgatcctgctcaattacctgcaccacgcacattactaactaagggtacactagaaccagaatatttcaattcagtgtgtagacttatgaaaactataggtccagacatgttcctcggaacttgtcgtagatgtcctgctgaaattgttgacactgtgagtgctttggtttatgataataagcttaaggcacataaagacaaatcagctcaatgctttaaaatgttctacaagggtgttatcacgcatgatgtttcatctgcaattaacaggccacaaataggcgtggtaagagaattccttacacgtaaccctgcttggagaaaagctgtctttatttcaccttacaattcccagaatgctgtagcctcaaagattttgggactaccaactcaaactgttgattcatcacagggctcagaatatgactatgtcatattcactcaaaccactgaaacagctcactcttgtaatgtaaacagattcaacgttgctattaccagagcaaaagtaggcatactttgcataatgtctgatagagacctttatgacaagttgcaatttacaagtcttgaaattccacgtaggaatgtggcaactttacaagctgaaaatgtaacaggactctttaaagattgtagtaaggtaatcactgggttacatcctacacaggcacctacacacttaagtgttgatactaaattcaaaactgaaggtttatgtgttgacatacctggcatacctaaggacatgacctatagaagattaatctctatgatgggtttcaaaatgaattaccaggttaatggttaccctaacatgtttatcacccgcgaagaagctataagacatgtacgtgcatggattggcttcgatgtcgaaggttgtcatgctactagagaagctgttggtaccaatttacctttacagctaggtttttctacaggtgttaacctagttgctgtacctacaggttatgttgatacacctaataatacagatttttccagagttagtgctaaaccaccgcctggagatcaatttaaacacctcataccacttatgtacaaaggacttccttggaatgtagtgcgtataaagattgtccaaatgttaagtgacacacttaaaaatctctctgacagagtcgtatttgtcttatgggcacatggctttgagttgacatctatgaagtattttgtgaagatcggacctgagcgcacatgttgtctatgtgatagacgtgctacatgcttttccactgcttcagacacttatgcctgttggcatcattctattggatttgattacgtctataatccgtttatgattgatgttcaacaatggggttttacaggtaacctacaaagcaaccatgatctgtattgtcaagtccatggtaatgcacatgtagctagttgtgatgcaatcatgactaggtgtctagctgtccacgagtgctttgttaagcgtgttgactggactattgaatatcctataatcggtgatgaactgaagattaatgcggcttgtagaaaggttcaacacatggttgttaaagctgcattattagcagacaaattcccagttcttcacgacattggtaaccctaaagctattaagtgtgtacctcaagctgatgtagaatggaagttctatgatgcacagccttgtagtgacaaagcttacaaaatagaagaactgttctattcttatgccacacattctgacaaattcacagatggtgtatgcctattttggaattgcaatgtcgatagatatcctgctaattccattgtttgtagatttgacactagagtgctatctaaccttaacttgcctggttgtgatggtggcagtttgtatgtaaataagcatgcattccacacaccagcttttgataaaagtgcttttgttaatctaaagcaacttccatttttctattactctgacagtccatgtgagtctcatggaaaacaagtagtgtcagatatagattatgtaccactaaagtctgctacgtgtataacacgttgcaatttaggtggtgctgtctgtagacatcatgctaatgagtacagattgtatctcgatgcttataacatgatgatctcagctggctttagcttgtgggtttacaaacaatttgatacctataacctctggaacacttttacaagacttcagagtttagaaaatgtggcttttaatgttgtaaataagggacactttgatggacaacagggtgaagtaccagtttctatcattaacaacactgtttacacaaaagttgatggtgttgatgtagaattgtttgagaacaaaaccacattacctgttaatgtagcatttgagctttgggctaagcgcaacattaaaccagtaccagaggtgaaaatactcaataatttgggtgtggacattgctgctaatactgtgatctgggactacaaaagagatgctccagcacatatatctactattggtgtttgttctatgactgacatagccaagaaaccaactgaaacgatttgtgcaccactcactgtcttttttgatggtagagttgatggtcaagtagacttatttagaaatgcccgtaatggtgttcttattacagaaggtagtgttaaaggtttacaaccatctgtaggtcccaaacaagctagtcttaatggagtcacattaattggagaagccgtaaaaacacagttcaattattacaagaaagtggatggtgttgtccaacaattacctgaaacttactttactcagagtagaaacttacaggaatttaagcccaggagtcaaatggaaattgatttcttagaacttgctatggatgaattcattgaacggtataaattagaaggctatgccttcgaacatatcgtttatggagattttagtcatagtcagttaggtggtttacatctactgattggactagctaaacgttttaaggaatcaccttttgaacttgaagattttattcctatggacagtacagttaaaaactacttcataacagatgcgcaaacaggttcatctaagtgtgtgtgttctgttattgatcttttacttgatgacttcgttgaaataataaagtcccaagatttatctgtagtttctaaggttgtcaaagtgactattgactatacagaaatctcatttatgctttggtgtaaagatggccatgtagaaacattttacccaaaattacaatctagtcaagcgtggcaaccgggtgttgctatgcctaatctttacaaaatgcaaagaatgctattagaaaagtgtgaccttcaaaattatggtgatagtgcaacattacctaaaggcataatgatgaatgtcgcaaaatatactcaactgtgtcaatatttaaacacactgacattagctgtaccctataatatgagagttatccattttggtgctggttctgataaaggagttgcaccaggtacagctgttttaagacaatggttgcctacaggtacgctgcttgtcgattcagatcttaatgactttgtctctgatgcagattcaactttgattggtgattgtgcaactgtacatacagctaataaatgggatctcattattagtgatatgtacgaccctaagactaagaatgtcacaaaagaaaacgactctaaagagggttttttcacttacatttgtgggtttatacaacaaaagctagctcttggaggttccgtggctataaagataacagaacattcttggaatgctgatctttataagctcatgggacacttcgcatggtggacagcctttgttactaatgtgaatgcgtcatcatctgaagcatttttaatcggatgtaactaccttggcaaaccacgcgaacaaatagatggttatgtcatgcatgcaaattacatattttggaggaatacaaatccaattcagctttcttcttattctttattcgacatgagtaaattcccccttaaattaaggggtactgctgttatgtctttaaaagaaggtcaaatcaatgatatgattctctctcttcttagtaaaggtagacttataattagagaaaacaacagagttgttatttctagtgatgttcttgttaacaactaaacgaacaatgtttgtttttcttgttttattgccactagtctctagtcagtgtgttaatcttacaaccagaactcaattaccccctgcatacactaattctttcacacgtggtgtttattaccctgacaaagttttcagatcctcagttttacattcaactcaggacttgttcttacctttcttttccaatgttacttggttccatgctatacatgtctctgggaccaatggtactaagaggtttgataaccctgtcctaccatttaatgatggtgtttactttgcttccactgagaagtctaacataataagaggctggatttttggtactactttagattcgaaaacccagtccctacttattgttaataacgctactaatgttgttatcaaagtctgtgaatttcaattttgtaacgatccatttttgggtgtttattaccacaaaaacaacaaaagttggatggaaagtgagttcagagtttattctagtgcgaataattgcacttttgaatacgtctctcagccttttcttatggaccttgaaggaaaacagggtaatttcaaaaatcttagggaatttgtgttcaagaatattgatggttacttcaagatatactctaagcacacgcctattaatttagtgcgtgatctccctcagggtttttcggctttagaaccattggtagatttgccaataggtattaacatcactaggtttcaaactttacttgctttacatagaagttatttaactcctggtgattcttcttcaggttggacagctggtgctgcagcttattatgtgggttatcttcaacctaggacttttctactgaagtacaatgaaaatggaaccattacagatgctgtagactgtgcacttgaccctctctcagaaacaaagtgtacgttgaaatccttcactgtagaaaaaggaatctatcaaacttctaactttagagtccaaccaacagaatctattgttagatttcctaacatcacaaacttgtgcccttttggtgaagtttttaacgccaccagatttgcatctgtttatgcttggaacaggaagagaatcagcaactgtgttgctgattattctgtcctgtataattccgcatcattttccacttttaagtgttatggagtgtctcctactaaattaaatgatctctgctttactaatgtctatgcagattcatttgtaattagaggtgatgaagtcagacaaatcgctccagggcaaactggaaagattgctgattataactacaaattaccagatgattttacaggctgcgttatagcttggaattctaacaatcttgattctaaggttggtggtaattataattacctgtacagattgtttaggaagtctaatctcaaaccttttgagagagatatttcaactgaaatctatcaggccggtagcacaccttgtaatggtgttgaaggttttaattgttactttcctctgcaatcatatggtttccaacccactaatggtgttggttaccaaccatacagagtagtagtactttcttttgaacttctacatgcaccagcaactgtttgtggacctaaaaagtctactaatttggttaagaacaagtgtgtcaatttcaacttcaatggtttaacaggcacaggtgttcttactgagtctaacaaaaagtttctgcctttccaacaatttggcagagacattgctgacactactgatgctgttcgtgatccacaaacacttgagattcttgacattacaccatgttcttttggtggtgtcagtgttataacaccaggaacaaatacttctaaccaggttgctgttctttatcaggatgttaactgcacagaagtccctgttgctattcatgcagatcaacttactcctacttggcgtgtttattctacaggttctaatgtttttcaaacacgtgcaggctgtttaataggggctgaacatgtcaacaactcatatgagtgtgacatacccattggtgcaggtatatgcgctagttatcagactcagactaattctcctcggagagcaagaagtgtagctagtcaatccatcattgcctacactatgtcacttggtgcagaaaattcagttgcttactctaataactctattgccatacccacaaattttactattagcgttaccacagaaattctaccagtgtctatgaccaagacatcagtagattgtacaatgtacatttgtggtgattcaactgaatgcagcaatcttttgttgcaatatggcagtttttgtacacaattaaaccgtgctttaactggaatagctgttgaacaagacaaaaacacccaagaagtttttgcacaagtcaaacaaatttacaagacaccaccaattaaagattttggcggttttaattttagccagatactgccagatccatcaaaaccaagcaagaggtcatttattgaagatctactgttcaacaaagtgacacttgcagatgctggcttcatcaaacaatatggtgattgccttggtgatattgctgctagagacctcatttgtgcacaaaagtttaacggccttactgttttgccacctttgctcacagatgaaatgattgctcaatacacttctgcactgttagcaggtacaatcacttctggttggacttttggtgcaggtgctgcattacaaataccatttgctatgcaaatggcttataggtttaatggtattggagttacacagaatgttctctatgagaaccaaaaattgattgccaaccaatttaatagtgctattggcaaaattcaagactcactttcttccacagcaagtgcacttggaaaacttcaagatgtggtcaaccaaaatgcacaagctttaaacacgcttgttaaacaacttagctccaattttggtgcaatttcaagtgttttaaacgacatcctttcacgtcttgacaaagttgaggctgaagtgcaaattgataggttgatcacaggcagacttcaaagtttgcagacatatgtgactcaacaattaattagagctgcagaaatcagagcttctgctaatcttgctgctactaaaatgtcagagtgtgtacttggacaatcaaaaagagttgacttttgcggaaagggctatcatcttatgtcatttcctcagtcagcacctcatggtgtcgtctttttgcatgtgacttatgtccctgcacaagaaaagaacttcacaactgctcctgccatttgtcatgatggaaaagcacactttcctcgtgaaggtgtctttgtttcaaatggcacacactggtttgtaacacaaaggaatttttatgaaccacaaatcattactacagacaacacatttgtgtctggtaactgtgatgttgtaataggaattgtcaacaacacagtttatgatcctttgcaacctgaattagactcattcaaggaggagcttgataaatacttcaagaaccatacctcaccagatgttgatttaggtgacatctctggcattaatgcttcagttgtaaacattcagaaagaaatcgaccgcctcaatgaggttgccaagaatttaaatgaatctctcatcgatctccaagaacttggaaagtatgagcagtatataaaatggccatggtacatttggctaggttttatagctggcttgattgccatagtaatggtgacaattatgctttgctgtatgaccagttgctgtagttgtctcaagggctgttgttcttgtggatcctgctgcaaatttgacgaggacgactctgagccagtgctcaaaggagtcaaattacattacacataaacgaacttatggatttgtttatgagaatcttcacaattggaactgtaactttgaagcaaggtgaaatcaaggatgctactccttcagattttgttagagctactgcaacgataccgatacaagcatcacttcctttcggatggcttattgttggcgttgcacttcttgctgtttttcagagcgcttccaaaatcataaccctcaaaaagagatggcaactagcactctccaagggtgttcactttgtttgcaacttgctgttgttgtttgtaacagtttactcacatcttttgcttgttgctgctggccttgaagccccttttctctatctttatgctttagtctacttcttgcagagtataaactttgtacgcataataatgaggctttggctttgctggaaatgccgttccaaaaacccattactttatgatgccaactattttctttgctggcatactaattgttacgactattgtataccttacaatagtgtaacttcttcaattgtcattacttcaggtgatggcacaacaagtcctatttctgaacatgactaccagattggtggttatactgaaaaatgggaatctggagtaaaagactgtgttgtattacacagttacttcacttcagactattaccagctgtactcaactcaattgagtacagacactggtgttgaacatgttaccttcttcatctacaataaaatcgttgatgagcctgaagaacatgtccaaattcacacaatcgacgtttcatccggagttgttaatccagtaatggaaccaatttatgatgaaccgacgacgactactagcgtgcctttgtaagcacaagctgatgagtacgaacttatgtactcattcgtttcggaagagacaggtacgttaatagttaatagcgtacttctttttcttgctttcgtggtattcttgctagttacactagccattcttactgcgcttcgattgtgtgcgtactgttgcaatattgttaacgtgagtcttgtaaaaccttctttttacgtttactctcgtgttaaaaatctgaattcttctcgggttcctgatcttctggtctaaacgaactaaatattatattagtttttctgtttggaactttaattttagccatggcagattccaacggtactattaccgttgaggagctgaaaaagctccttgaacaatggaacctagtaataggtttcctattccttacatggatttgcctgctgcaatttgcctatgccaacaggaataggtttttgtacatcattaagttgattttcctctggctgttatggccagtaactttagcttgttttgtgcttgctgctgtttacagaataaattggatcaccggtggaattgctattgcaatggcttgtcttgtaggattgatgtggctaagctacttcattgcttctttcagactgtttgcgcgtacgcgttccatgtggtcattcaatccagaaactaacattcttctcaacgtgccactccatggaactattctgactagaccgcttctagaaagtgaactcgtaatcggagctgttatccttcgtggacatcttcgtattgctggacatcatctaggacgctgtgacatcaaggatctacctaaagaaatcactgttgctacatcacgaacgctttcttattacaaattgggagcttcacagcgtgtagcaggtgattcaggttttgctgcatatagtcgctacaggattggcaactataaattaaacacagaccattccagtagcagtgacaatattgctttgcttgtacagtaagtgacaacagatgtttcatctcgttgactttcaggttactatagcagagatattactaatcatcatgaggacttttaaagtttccatttggaatcttgattacatcataaacctcataattaagaacttaagcaagtcactaactgagaataaatattctcaactagacgaggagcagccaatggagattgattaaacgaacatgaaaattattcttttcttggcactgataacactcgctacttgtgagctttatcactaccaagagtgtgttagaggtacaacagtacttttaaaagaaccttgctcgtcgggaacatacgagggcaattcaccatttcatcctctagctgataacaaatttgcactgacttgctttagcactcaatttgcttttgcttgtcctgacggcgtaaaacacgtctatcagttacgtgccagatcagtttcacctaaactgttcatcagacaagaggaagttcaagaactttactctccaatttttcttattgttgcggcaatagtgtttataacactttgcttcacactcaaaagaaagacagaatgattgaactttcattaattgacttctatttgtgctttttagcctttctgctattccttgttttaattatgcttattatcttttggttctcacttgaactgcaagatcataatgaaacttgtcacgcctaaacgaacatgaaatttcttgttttcttaggaatcatcacaactgtagctgcatttcaccaagaatgtagtttacagtcatgtactcaacatcaaccatatgtagttgatgacccgtgtcctattcacttctattctaaatggtatatcagagtaggagctagaaaatcagcacctttaattgaattgtgcgtggatgaggctggttctaaatcacccattcagtacatcgatatcggtaattatacagtttcctgtttaccttttacaattaactgccaggaacctaaattgggtagtcttgtagtgcgttgttcgttctacgaggactttttagagtatcatgacgttcgtgttgttttagatttcatctaaacgaacaaactaaaatgtctgataatggacctcaaaatcagcgaaatgcacctcgcattacgtttggtggaccatcagattcaactggcagtaaccagaatggagaacgaagtggtgcgcgatcaaaacaacgccgcccgcaaggtttacccaataatactgcgtcttggttcaccgctctcactcaacatggcaaggaagatttaaaattccctcgaggacaaggcgttccaattaacaccaatagcagtccagatgaccaaattggctactaccgccgcgccacaagacgaattcgtggtggtgatggtaaaatgaaagatctcagtccaagatggtatttctactatctaggaactgggccagaagctggacttccttatggtgctaacaaagatggcatcatatgggttgcaactgagggagccttgaatacaccaaaagatcacattggcaccagaaatcctgctaacaatgctgcaatcgtgctacaacttcctcaaggaacaacattaccaaaaggtttttacgcagaagggtctagaggtggaagtcaagcctcttctagatcatcatcacgtagtcgcaacagttcaagaaattcaactccaggttcaagtagaggaacttctcctgctagaatggctggaaatggaggtgatgctgctcttgctttgttactacttgacagattgaaccagcttgagagcaaaatgtctggtaaaggccaacaacaacaaggccaaactgtcactaagaaatctgctgctgaggcttctaagaagcctagacaaaaacgtactgccactaaagcatacaatgtaacacaagctttcggcagacgtggtccagaacaaactcaaggaaattttggggatcaggaactaatcagacaaggaactgattacaaacattggccgcaaattgcacaatttgctccttctgcttcagcgttctttggaatgtcgagaattggaatggaagtcacaccttcgggaacatggttgacctatacaggtgccatcaaattggatgacaaagatccaaatttcaaagatcaagtcattttgctgaataagcatattgacgcatacaaaacattcccaccaacagagcctaaaaaggacaaaaagaagaaggctgatgaaactcaagccttaccgcagagacagaagaaacagcaaactgtgactcttcttcctgctgcagatttggatgatttctccaaacaattgcaacaatccatgagcagtgctgactcaactcaggcctaaactcatgcagaccacacaaggcagatgggctatataaacgttttcgcttttccgtttacgatatatagtctactcttgtgcagaatgaattctcgtaactacatagcacaagtagatgtagttaactttaatctcacatagcaatctttaatcagtgtgtaacattagggaggacttgaaagagccaccacattttcaccgaggccacgcggagtacgatcgagtgtacagtgaacaatgctagggagagctgcctatatggaagagccctaatgtgtaaaattaattttagtagtgctatccccatgtgattttaatagcttcttaggagaatgacaaaaaaaaacaaaaaaaa

SEQ ID NO: 45 - DNA, 10827 bp, Artificial Sequence
  vector
cggccgtaagatacattgatgagtttggacaaaccacaactagaatgcagtgaaaaaaatgctttatttgtgaaatttgtgatgctatagctttatttgtaaccattataagctgcaataaacaagttgtttaaaccacgtgatgaccatacacctcgggatactagatgtataatgtccgccatgcagacgaaaccagtcggagattaccgagcattctatcacgtcggcgaccaatagtgagcttagggataacagggtaataaacgatccccgggaattcactggccgtcgttttacaacgtcgtgactgggaaaaccctggcgttacccaacttaatcgccttgcagcacatccccctttcgccagctggcgtaatagcgaagaggcccgcaccgatcgcccttcccaacagttgcgcagcctgaatggcgaatggcgatagatccggtggatgaccttttgaatgacctttaatagattatattactaattaattggggaccctagaggtccccttttttattttaaaaattttttcacaaaacggtttacaagcataaagctcggacggatcttttccgctgcataaccctgcttcggggtcattatagcgattttttcggtatatccatcctttttcgcacgatatacaggattttgccaaagggttcgtgtagactttccttggtgtatccaacggcgtcagccgggcaggataggtgaagtaggcccacccgcgagcgggtgttccttcttcactgtcccttattcgcacctggcggtgctcaacgggaatcctgctctgcgaggctggccggctaccgccggcgtaacagatgagggcaagcggatggctgatgaaaccaagccaaccaggaagggcagcccacctatcaaggtgtcgatgcaggggggggggaaagccacgttgtgtctcaaaatctctgatgttacattgcacaagataaaaatatatcatcatgaacaataaaactgtctgcttacataaacagtaatacaaggggtgttatgagccatattcaacgggaaacgtcttgctcaaggccgcgattaaattccaacatggatgctgatttatatgggtataaatgggctcgcgataatgtcgggcaatcaggtgcgacaatctatcgattgtatgggaagcccgatgcgccagagttgtttctgaaacatggcaaaggtagcgttgccaatgatgttacagatgagatggtcagactaaactggctgacggaatttatgcctcttccgaccatcaagcattttatccgtactcctgatgatgcatggttactcaccactgcgatccccggaaaaacagcattccaggtattagaagaatatcctgattcaggtgaaaatattgttgatgcgctggcagtgttcctgcgccggttgcattcgattcctgtttgtaattgtccttttaacagcgatcgcgtatttcgtctcgctcaggcgcaatcacgaatgaataacggtttggttgatgcgagtgattttgatgacgagcgtaatggctggcctgttgaacaagtctggaaagaaatgcataagtttttgccattctcaccggattcagtcgtcactcatggtgatttctcacttgataaccttatttttgacgaggggaaattaataggttgtattgatgttggacgagtcggaatcgcagaccgataccaggatcttgccatcctatggaactgcctcggtgagttttctccttcattacagaaacggctttttcaaaaatatggtattgataatcctgatatgaataaattgcagtttcatttgatgctcgatgagtttttctaatcagaattggttaattggttgtaacactggcagagcattacgctgacttgacgggacggcggctttgttgaataaatcgaacttttgctgagttgaaggatcagatcacgcatcttcccgacaacgcagaccgttccgtggcaaagcaaaagttcaaaatcaccaactggtccacctacaacaaagctctcatcaaccgtggctccctcactttctggctggatgatggggcgattcaggcctggtatgagtcagcaacaccttcttcacgaggcagacctcagacggtatcggatcgatcccccgatgtgtagcagtggcggaccatataggcagatcagaaggcgcggttctcctacatgagcttttcaattcaattcatcattttttttttattcttttttttgatttcggtttccttgaaatttttttgattcggtaatctccgaacagaaggaagaacgaaggaaggagcacagacttagattggtatatatacgcatatgtagtgttgaagaaacatgaaattgcccagtattcttaacccaactgcacagaacaaaaacctgcaggaaacgaagataaatcatgtcgaaagctacatataaggaacgtgctgctactcatcctagtcctgttgctgccaagctatttaatatcatgcacgaaaagcaaacaaacttgtgtgcttcattggatgttcgtaccaccaaggaattactggagttagttgaagcattaggtcccaaaatttgtttactaaaaacacatgtggatatcttgactgatttttccatggagggcacagttaagccgctaaaggcattatccgccaagtacaattttttactcttcgaagacagaaaatttgctgacattggtaatacagtcaaattgcagtactctgcgggtgtatacagaatagcagaatgggcagacattacgaatgcacacggtgtggtgggcccaggtattgttagcggtttgaagcaggcggcagaagaagtaacaaaggaacctagaggccttttgatgttagcagaattgtcatgcaagggctccctatctactggagaatatactaagggtactgttgacattgcgaagagcgacaaagattttgttatcggctttattgctcaaagagacatgggtggaagagatgaaggttacgattggttgattatgacacccggtgtgggtttagatgacaagggagacgcattgggtcaacagtatagaaccgtggatgatgtggtctctacaggatctgacattattattgttggaagaggactatttgcaaagggaagggatgctaaggtagagggtgaacgttacagaaaagcaggctgggaagcatatttgagaagatgcggccagcaaaactaaaaaactgtattataagtaaatgcatgtatactaaactcacaaattagagcttcaatttaattatatcagttattacccgggaatctcggtcgtaatgatttttataatgacgaaaaaaaaaaaattggaaagaaaaagctgggcgcgccggccggcccttttcatcacgtgctataaaaataattataatttaaattttttaatataaatatataaattaaaaatagaaagtaaaaaaagaaattaaagaaaaaatagtttttgttttccgaagatgtaaaagactctagggggatcgccaacaaatactaccttttatcttgctcttcctgctctcaggtattaatgccgaattgtttcatcttgtctgtgtagaagaccacacacgaaaatcctgtgattttacattttacttatcgttaatcgaatgtatatctatttaatctgcttttcttgtctaataaatatatatgtaaagtacgctttttgttgaaattttttaaacctttgtttatttttttttttcttcattccgtaactcttctaccttctttatttactttctaaaatccaaatacaaaacataaaaataaataaacacagagtaaattcccaaattattccatcattaaaagatacgaggcgcgtgtaagttacaggcaagcgatcggccggcccgggcatttaaatgcaggccgcgtacgcgtcgacggtaccgaattcgcttaaacgagctcatgttcgccggtgaacgcgttgaggaagccgggcagtgcctcggcaaaatccttgcgtgtagacaagacatctgcgtagcagttgtcctcaacaacgatgtcgaaatccaaatcggagtgctcatcgagtcctccgtgaacgtaagagccgccgatcagaagagcgcggaagcgaacatcggaagcgaccgcatcgcggatgcggttcaagaaagttgcatgagcttgtggaagtgtgctgagcataaatgattctcctagctgttctttgggtaagtacgccatcaggacgttgtgagtggcgcgatttttagcggctgaaatcagcccttgagcctgtcggcaagtcgcgtcatgaggtccatgcgctcatgcaggatcgccacgaccaacgcgggttcgcccgcacgcggcaggcaaaaaacgtagtggtgttcgcagcgggccatccgcagcgcgggaaagagttcgctcatgtccttaaacgggccttcgccggcggcaagcctggctatgccctgttccagcttagcgatatagcggcgcacctgcgccgcgccccactcccggcgcgtgtagcggatgatgccgcgtagatcggcttcggcctcagccgtgaggatgtaggccgtcaagcgcgatccccgctgagttcttcatcaagaatttcgccgacgctcttggtggacaccttgccggcaagcccatcgttgatgcggttccccagcatggttttcagttcctgccatgcctgatcggcatcagcgtcaccggggaacagacgttcgagggcgtattgcttaatggtcttgccctgcaaggcggccagggctttcaggctctggtgctgctggtccgtcatgtcgattgtcaggcggctcattggataacctccataaaatacacgtaaccacattagcacatatgtgggcgtgaggctacagcgcgaggcgcattaaggtcgggaaaatgcgctaggcgcatttaaattgcgtattgctgtaatgcgccatgccggctagactaggcccaaatgggtatacccaatttgaccaagggggacgcgatgagggcggccaagcactaccgacaacttctatccatcgacttcaacatcgaggcgctggccttcgtgcctggacccgacggcacacgcggccggcgcatccacgtcctggggcgcgaggtccgcgaccggcccggcctggtcgagtacctttcgccggcgttcggctcgcgggtggcgctggacggctactgcaaggccaatttcgatgcagtgctgcacctggcgtaccccgatcatcagcaatggggccacgcatgaagcgccgaagctacgccatgctgcgcgccgctgccgcgctggccgtcctggtcgttgcctcgccggcatgggccgagctgcgcggcgaggtcgtgcgcatcatcgacggcgacaccatcgacgtgctggtagacaagcagccggtgcgcgtgcgcctggtggacattgacgcgccggaaaagcggcaagccttcggcgaacgtgcgcgccaggcgctggccggcatggtgttccgccggcacgtcctggtcgacgagaaggacaccgaccgttacggccgcacgctgggcaccgtgtgggtcaacatggagctggccagccggccgccgcagccgcgcaacgtcaacgccgcgatggttcaccagggcatggcgtgggcctatcgcttccacggccgcgcggccgaccctgaaatgctgcggctcgaacaggaggcgcgaggcaagcgcgtcggcctctggtccgatccgcacgccgtcgagccgtggaaatggcgacgcgagagcaacaaccggagggacgaaggttgaaggtcgcccgcatctacctgcgcgccagtacggacgagcagaatcttgaacgccaggagagccttgtagcggccacgcgggccgccgggtactacgtcgccggcatctaccgcgagaaggcgtccggcgcacgcgccgaccggcccgagctgctgcgcatgatcgcggacctgcaacctggtgaagtcgtcgttgcggagaagatcgaccgcatcagccgcttgccgttggccgaggccgagcgcctggttgcgtcgatccgggccaaaggggccaagctggccgtgcctggcgtggtggacctgtcggagctggccgccgaggcgaacggagtggcgaaaatcgttctggaatccgtccaggacatgcttttgaagctcgccttgcagatggcccgcgacgactacgaggatcggcgcgagcgtcaacgtcagggtgtccagttggcgaaggccgccggccgctacaccggccgcaaacgtgacgccggcatgcacgaccgcatcatcacgcttcgctccggcggatcgagcattgccaagacggccaagctggtcggatgcagcccgagccaggtcaaacgagtgtgggcggcctggaacgcgcagcagcaaaaataaagccgggcagtgcccggcttttctcaccttttcgcgtcccgcagggccgctgcgagcgccctacctagatcctcgctttccccctcggtgtagtccggccagggcacgaagggcgcggatgcgaacctgttgagcaggtacgccttcgggcagcggtagaccaccggcgagttcgccttttcatcccaccgggccaggatcacgtccgcatcacagtgcatgtccttcacctggtcgcggaagaagccgaaggccaccatgccgctatgttcgccgaggaacgccagttgcttcgcgctggcgatcgcgccgacgccgccggccaaaaccgacgccatcacccagccgacgaaccagaagctggcatgcttgcggttgaccaccgcacgcgcagccgcgaccaggacaacggccaagctgccgaccagggccatgacgaccgtgatccggccgttgtggaaagcgatgggcttgccagcgtccgcttgcacggcgtcgtaaatgctggacccgatgggcgcgcacatcagcacgacaggcagcagcaccaggaacatcgtccgcgtccattgcgcgagtgccttgcggcgttcgccggcggcaagcgcctccatcatcggcgtgaagcccaacagggccaccgcagccgccaagccggcaacgatgccgcaggcgattacatacatacatcctccctaatgcgccttgcgcacggttgtagtcagagtccgcggtggggcgataagctcatgaccaaaatcccttaacgtgagttttcgttccactgagcgtcagaccccgtagaaaagatcaaaggatcttcttgagatcctttttttctgcgggggatcaggaccgctgccggagcgcaacccactcactacagcagagccatgtagacaacatcccctccccctttccaccgcgtcagacgcccgtagcagcccgctacgggctttttcatgccctgccctagcgtccaagcctcacggccgcgctcggcctctctggcggccttctggcgctcctgctgcggcgtccgctcgtgggccgtggcgcgggtccgcgcgccggcctcgtgcgcctggcgctcgcgggcgaggtccagggcggccgtcttcacgttctgccttgcgcagatgagatagatcgatctagcgtggactcaaggctctcgcgaatggctcgcgttggaaactttcattgacacttgaggggcaccgcagggaaattctcgtccttgcgagaaccggctatgtcgtgctgcgcatcgagcctgcgcccttggcttgtctcgcccctctccgcgtcgctacggggcttccagcgcctttccgacgctcaccgggctggttgccctcgccgctgggctggcggccgtctatggccctgcaaacgcgccagaaacgccgtcgaagccgtgtgcgagacaccgcggccgccggcgttgtggatacctcgcggaaaacttggccctcactgacagatgaggggcggacgttgacacttgaggggccgactcacccggcgcggcgttgacagatgaggggcaggctcgatttcggccggcgacgtggagctggccagcctcgcaaatcggcgaaaacgcctgattttacgcgagtttcccacagatgatgtggacaagcctggggataagtgccctgcggtattgacacttgaggggcgcgactactgacagatgaggggcgcgatccttgacacttgaggggcagagtgctgacagatgaggggcgcacctattgacatttgaggggctgtccacaggcagaaaatccagcatttgcaagggtttccgcccgtttttcggccaccgctaacctgtcttttaacctgcttttaaaccaatatttataaaccttgtttttaaccagggctgcgccctgtgcgcgtgaccgcgcacgccgaaggggggtgcccccccttctcgaaccctcccggcccgctaacgcgggcctcccatccccccaggggctgcgcccctcggccgcgaacggcctcaccccaaaaatggcagcgctggcagtccttgccattgccgggatcggggcagtaacgggatgggcgatcagcccgagcgcgacgcccggaagcattgacgtgccgcaggtgctggcatcgacattcagcgaccaggtgccgggcagtgagggcggcggcctgggtggcggcctgcccttcacttcggccgtcggggcattcacggacttcatggcggggccggcaatttttaccttgggcattcttggcatagtggtcgcgggtgccgtgctcgtgttcgggggtgaattaattccccggatcgatccgtcagcttcacgctgccgcaagcactcagggcgcaagggctgctaaaggaagcggaacacgtagaaagccagtccgcagaaacggtgctgaccccggatgaatgtcagctactgggctatctggacaagggaaaacgcaagcgcaaagagaaagcaggtagcttgcagtgggcttacatggcgatagctagactgggcggttttatggacagcaagcgaaccggaattgccagctggggcgccctctggtaaggttgggaagccctgcaaagtaaactggatggctttcttgccgccaaggatctgatggcgcaggggatcaagatcgacggatcgatccggggaattaattccggggcaatcccgcaaggagggtgaatgaatcggacgtttgaccggaaggcatacaggcaagaactgatcgacgcggggttttccgccgaggatgccgaaaccatcgcaagccgcaccgtcatgcgtgcgccccgcgaaaccttccagtccgtcggctcgatggtccagcaagctacggccaagatcgagcgcgacagcgtgcaactggctccccctgccctgcccgcgccatcggccgccgtggagcgttcgcgtcgtctcgaacaggaggcggcaggtttggcgaagtcgatgaccatcgacacgcgaggaactatgacgaccaagaagcgaaaaaccgccggcgaggacctggcaaaacaggtcagcgaggccaagcaggccgcgttgctgaaacacacgaagcagcagatcaaggaaatgcagctttccttgttcgatattgcgccgtggccggacacgatgcgagcgatgccaaacgacacggcccgctctgccctgttcaccacgcgcaacaagaaaatcccgcgcgaggcgctgcaaaacaaggtcattttccacgtcaacaaggacgtgaagatcacctacaccggcgtcgagctgcgggccgacgatgacgaactggtgtggcagcaggtgttggagtacgcgaagcgcacccctatcggcgagccgatcaccttcacgttctacgagctttgccaggacctgggctggtcgatcaatggccggtattacacgaaggccgaggaatgcctgtcgcgcctacaggcgacggcgatgggcttcacgtccgaccgcgttgggcacctggaatcggtgtcgctgctgcaccgcttccgcgtcctggaccgtggcaagaaaacgtcccgttgccaggtcctgatcgacgaggaaatcgtcgtgctgtttgctggcgaccactacacgaaattcatatgggagaagtaccgcaagctgtcgccgacggcccgacggatgttcgactatttcagctcgcaccgggagccgtacccgctcaagctggaaaccttccgcctcatgtgcggatcggattccacccgcgtgaagaagtggcgcgagcaggtcggcgaagcctgcgaagagttgcgaggcagcggcctggtggaacacgcctgggtcaatgatgacctggtgcattgcaaacgctagggccttgtggggtcagttccggctgggggttcagcagccactcgatcgaggtcccaatacgcaaaccgcctctccccgcgcgttggccgattcattaatgcagctggcacgacaggtttcccgactggaaagcgggcagtgagcgcaacgcaattaatgtgagttagctcactcattaggcaccccaggctttacactttatgcttccggctcgtatgttgtgtggaattgtgagcggataacaatttcacacaggaaacagctatgaccatgattacgccaagcttccatgggatatcgagatctcctgcagagctctagagtcgagactagtctcgacgggcccggtaccccctcgagggggccgcacttaagttacgcgtggatcgtggagctttcgggttttaactataacggtcctaaggtagcgaactcgggtcttgccttaatcccaacaaccggattatctacacggatttcaatagctgatatagcgaatcaccgagattaattaa

SEQ ID NO: 46 - DNA, 506 bp, Artificial Sequence
  origin of replication
atcacgtgctataaaaataattataatttaaattttttaatataaatatataaattaaaaatagaaagtaaaaaaagaaattaaagaaaaaatagtttttgttttccgaagatgtaaaagactctagggggatcgccaacaaatactaccttttatcttgctcttcctgctctcaggtattaatgccgaattgtttcatcttgtctgtgtagaagaccacacacgaaaatcctgtgattttacattttacttatcgttaatcgaatgtatatctatttaatctgcttttcttgtctaataaatatatatgtaaagtacgctttttgttgaaattttttaaacctttgtttatttttttttttcttcattccgtaactcttctaccttctttatttactttctaaaatccaaatacaaaacataaaaataaataaacacagagtaaattcccaaattattccatcattaaaagatacgaggcgcgtgtaagttacaggcaagcgatc

SEQ ID NO: 47 - DNA, 1020 bp, Artificial Sequence
  selectionmarker
ttcaattcatcattttttttttattcttttttttgatttcggtttccttgaaatttttttgattcggtaatctccgaacagaaggaagaacgaaggaaggagcacagacttagattggtatatatacgcatatgtagtgttgaagaaacatgaaattgcccagtattcttaacccaactgcacagaacaaaaacctgcaggaaacgaagataaatcatgtcgaaagctacatataaggaacgtgctgctactcatcctagtcctgttgctgccaagctatttaatatcatgcacgaaaagcaaacaaacttgtgtgcttcattggatgttcgtaccaccaaggaattactggagttagttgaagcattaggtcccaaaatttgtttactaaaaacacatgtggatatcttgactgatttttccatggagggcacagttaagccgctaaaggcattatccgccaagtacaattttttactcttcgaagacagaaaatttgctgacattggtaatacagtcaaattgcagtactctgcgggtgtatacagaatagcagaatgggcagacattacgaatgcacacggtgtggtgggcccaggtattgttagcggtttgaagcaggcggcagaagaagtaacaaaggaacctagaggccttttgatgttagcagaattgtcatgcaagggctccctatctactggagaatatactaagggtactgttgacattgcgaagagcgacaaagattttgttatcggctttattgctcaaagagacatgggtggaagagatgaaggttacgattggttgattatgacacccggtgtgggtttagatgacaagggagacgcattgggtcaacagtatagaaccgtggatgatgtggtctctacaggatctgacattattattgttggaagaggactatttgcaaagggaagggatgctaaggtagagggtgaacgttacagaaaagcaggctgggaagcatatttgagaagatgcggccagcaaaactaa

SEQ ID NO: 48 - DNA, 228 bp, Artificial Sequence
  SARS-CoV-2 E
atgtactcattcgtttcggaagagacaggtacgttaatagttaatagcgtacttctttttcttgctttcgtggtattcttgctagttacactagccattcttactgcgcttcgattgtgtgcgtactgttgcaatattgttaacgtgagtcttgtaaaaccttctttttacgtttactctcgtgttaaaaatctgaattcttctcgggttcctgatcttctggtctaa

SEQ ID NO: 49 - DNA, 669 bp, Artificial Sequence
  SARS-CoV-2 M
atggcagattccaacggtactattaccgttgaggagctgaaaaagctccttgaacaatggaacctagtaataggtttcctattccttacatggatttgcctgctgcaatttgcctatgccaacaggaataggtttttgtacatcattaagttgattttcctctggctgttatggccagtaactttagcttgttttgtgcttgctgctgtttacagaataaattggatcaccggtggaattgctattgcaatggcttgtcttgtaggattgatgtggctaagctacttcattgcttctttcagactgtttgcgcgtacgcgttccatgtggtcattcaatccagaaactaacattcttctcaacgtgccactccatggaactattctgactagaccgcttctagaaagtgaactcgtaatcggagctgttatccttcgtggacatcttcgtattgctggacatcatctaggacgctgtgacatcaaggatctacctaaagaaatcactgttgctacatcacgaacgctttcttattacaaattgggagcttcacagcgtgtagcaggtgattcaggttttgctgcatatagtcgctacaggattggcaactataaattaaacacagaccattccagtagcagtgacaatattgctttgcttgtacagtaa

SEQ ID NO: 50 - DNA, 1260 bp, Artificial Sequence
  SARS-CoV-2 N
atgtctgataatggacctcaaaatcagcgaaatgcacctcgcattacgtttggtggaccatcagattcaactggcagtaaccagaatggagaacgaagtggtgcgcgatcaaaacaacgccgcccgcaaggtttacccaataatactgcgtcttggttcaccgctctcactcaacatggcaaggaagatttaaaattccctcgaggacaaggcgttccaattaacaccaatagcagtccagatgaccaaattggctactaccgccgcgccacaagacgaattcgtggtggtgatggtaaaatgaaagatctcagtccaagatggtatttctactatctaggaactgggccagaagctggacttccttatggtgctaacaaagatggcatcatatgggttgcaactgagggagccttgaatacaccaaaagatcacattggcaccagaaatcctgctaacaatgctgcaatcgtgctacaacttcctcaaggaacaacattaccaaaaggtttttacgcagaagggtctagaggtggaagtcaagcctcttctagatcatcatcacgtagtcgcaacagttcaagaaattcaactccaggttcaagtagaggaacttctcctgctagaatggctggaaatggaggtgatgctgctcttgctttgttactacttgacagattgaaccagcttgagagcaaaatgtctggtaaaggccaacaacaacaaggccaaactgtcactaagaaatctgctgctgaggcttctaagaagcctagacaaaaacgtactgccactaaagcatacaatgtaacacaagctttcggcagacgtggtccagaacaaactcaaggaaattttggggatcaggaactaatcagacaaggaactgattacaaacattggccgcaaattgcacaatttgctccttctgcttcagcgttctttggaatgtcgagaattggaatggaagtcacaccttcgggaacatggttgacctatacaggtgccatcaaattggatgacaaagatccaaatttcaaagatcaagtcattttgctgaataagcatattgacgcatacaaaacattcccaccaacagagcctaaaaaggacaaaaagaagaaggctgatgaaactcaagccttaccgcagagacagaagaaacagcaaactgtgactcttcttcctgctgcagatttggatgatttctccaaacaattgcaacaatccatgagcagtgctgactcaactcaggcctaa

SEQ ID NO: 51 - DNA, 21290 bp, Artificial Sequence
  SARS-CoV-2 ORF1ab
atggagagccttgtccctggtttcaacgagaaaacacacgtccaactcagtttgcctgttttacaggttcgcgacgtgttagtacgtggttttggagattcagtggaagaagtcttatcagaggcacgtcaacatcttaaagatggcacttgtggcttagtagaagttgaaaaaggcgttttgcctcaacttgaacagccctatgtgttcatcaaacgttctgatgctagaactgcacctcatggtcatgttatggttgagctggtagcagaattagaaggtattcagtacggtcgtagtggtgagacattaggtgttttagttcctcatgtgggcgaaataccagtggcttaccgcaaagttcttcttagaaagaacggtaataaaggagctggtggccatagttacggcgctgatttaaagtcatttgacttaggcgacgagcttggcactgatccttatgaagatttccaagaaaactggaacactaaacatagcagtggtgttacccgtgaactcatgcgtgagttaaatggaggtgcatacactcgctatgtcgataacaacttctgtggacctgatggttaccctcttgagtgcattaaagaccttctagcacgtgctggtaaagcttcatgcactttgtccgaacaactggactttattgacactaagaggggtgtatactgctgccgtgaacatgagcatgaaattgcttggtacacggaacgttctgaaaagagctatgaattgcagacaccttttgaaattaaactggcaaagaaatttgacaccttcaatggggaatgtccaaattttgtatttcccctcaattccataatcaagactattcaaccaagggttgaaaagaaaaagcttgatggctttatgggtagaattcgatctgtctatccagttgcgtcaccaaatgaatgcaaccaaatgtgcctttcaactctcatgaagtgtgatcattgtggtgaaacttcatggcagacgggcgattttgttaaagccacttgcgaattttgtggcactgagaatttgactaaagaaggtgccactacttgtggttacttaccccaaaatgctgttgttaaaatttactgtccagcatgtcacaattcagaagtaggacctgagcatagtcttgccgaataccataatgaatctggcttgaaaaccattcttcgtaagggtggtcgcactattgcttttggaggatgtgtgttctcttatgttggttgccataacaagtgtgcttattgggttccacgtgcttcagctaacataggttgtaaccatacaggtgttgttggagaaggttccgaaggtcttaatgacaaccttcttgaaatactccaaaaagagaaagtcaacatcaatattgttggtgactttaaacttaatgaagagatcgccattattttggcatctttttctgcttccacaagtgcttttgtggaaactgtgaaaggtttggattataaagcattcaaacagattgttgaatcctgtggtaattttaaggttacaaagggaaaagctaaaaaaggtgcctggaatattggtgaacagaaatcaatactgagtcctctttatgcatttgcatcagaggctgctcgtgttgtacgatcaattttctcccgcactcttgaaactgctcaaaattctgtgcgtgttttacagaaggccgctataacaatactagatggaatttcacagtattcactgagactcattgatgctatgatgttcacatctgatttggctactaacaatctagttgtaatggcctacattacaggtggtgttgttcagttgacttcgcagtggctaactaacatctttggcactgtttatgaaaaactcaaacccgtccttgattggcttgaagagaagtttaaggaaggtgtagagtttcttagagacggttgggagattgttaaattcatctcaacctgtgcttgtgaaattgtcggtggacaaattgtcacctgtgctaaggaaattaaggagagtgttcagacattctttaagcttgtaaacaagtttttggctttgtgtgctgactctatcattattggtggagctaaacttaaagccttgaatttaggtgaaacatttgtcacgcactcaaagggattgtacagaaagtgtgttaaatccagagaagaaactggcctactcatgcctctaaaagccccaaaagaaattatcttcttagagggagaaacacttcccacagaagtgttaacagaggaagttgtcttgaaaactggtgatttacaaccattagaacaacctactagtgaagctgttgaagctccattggttggtacaccagtttgtattaacgggcttatgttgctcgaaatcaaagacacagaaaagtactgtgcccttgcacctaatatgatggtaacaaacaataccttcacactcaaaggcggtgcaccaacaaaggttacttttggtgatgacactgtgatagaagtgcaaggttacaagagtgtgaatatcacttttgaacttgatgaaaggattgataaagtacttaatgagaagtgctctgcctatacagttgaactcggtacagaagtaaatgagttcgcctgtgttgtggcagatgctgtcataaaaactttgcaaccagtatctgaattacttacaccactgggcattgatttagatgagtggagtatggctacatactacttatttgatgagtctggtgagtttaaattggcttcacatatgtattgttctttctaccctccagatgaggatgaagaagaaggtgattgtgaagaagaagagtttgagccatcaactcaatatgagtatggtactgaagatgattaccaaggtaaacctttggaatttggtgccacttctgctgctttacaacctgaagaagaacaagaagaagattggttagatgatgatagtcaacaaactgttggtcaacaagacggcagtgaggacaatcagacaactactattcaaacaattgttgaggttcaacctcaattagagatggaacttacaccagttgttcagactattgaagtgaatagttttagtggttatcttaaacttactgacaatgtatacatcaagaatgcagacattgtggaagaagctaaaaaggtaaaaccaacagtggttgttaatgcagccaatgtttaccttaaacatggaggaggtgttgcaggagccttaaataaggctactaacaatgccatgcaagttgaatctgatgattacatagctactaatggaccacttaaagtgggtggtagttgtgttttaagcggacacaatcttgctaaacactgtttacatgttgtcggcccaaatgttaacaaaggtgaagatattcaacttcttaagagtgcttatgaaaattttaaccagcacgaagttctacttgcaccattattatcagctggtatttttggtgctgaccctatacattctttaagagtttgtgtagatactgttcgcacaaatgtctacttagctgtctttgataaaaatctctatgacaaacttgtttcaagctttttggaaatgaagagtgaaaagcaagttgaacaaaagatcgctgagattcctaaagaggaagttaagccatttataactgaaagtaaaccttcagttgaacagagaaaacaagatgataagaagatcaaagcttgtgttgaagaagttacaacaactctggaagaaactaagttcctcacagaaaacttgctcctttatatcgacattaatggcaatcttcatccagattctgccactcttgttagtgacattgacatcactttcttaaagaaagatgctccatatatagtgggtgatgttgttcaagagggtgttttaactgctgtggttatacctactaaaaaggctggtggcactactgaaatgctagcgaaagctttgagaaaagtgccaacagacaattatataaccacttacccgggtcagggtttaaatggttacactgtagaggaggcaaagacagtgcttaaaaagtgtaaaagtgccttttacattctaccatctattatctctaatgagaagcaagaaattcttggaactgtttcttggaatttgcgagaaatgcttgcacatgcagaagaaacacgcaaattaatgcctgtctgtgtggaaactaaagccatagtttcaactatacagcgtaaatataagggtatcaagatacaagagggtgtggttgattatggtgctagattttacttttacaccagtaaaacaactgtagcgtcacttatcaacacacttaacgatctaaatgaaactcttgttacaatgccacttggctatgtaacacatggcttaaatttggaagaagctgctcggtatatgagatctctcaaagtgccagctacagtttctgtttcttcacctgatgctgttacagcgtataatggttatcttacttcttcttctaaaacacctgaagaacattttattgaaaccatctcacttgctggttcctataaagattggtcctattctggacaatctacacaactaggtatagaatttcttaagagaggtgataaaagtgtatattacacgtccaatcctaccacattccacctagatggtgaagttatcacctttgacaatcttaagacacttctttctttgagagaagtgaggactattaaggtgtttacaacagtagacaacattaacctccacacgcaagttgtggacatgtcaatgacatatggacaacagtttggtccaacttatttggatggagctgatgttactaagataaaacctcataactcacatgaaggtaaaacattttacgttttgcctaatgatgacactctacgtgttgaggcttttgagtactaccacacaactgatcctagttttctgggtaggtacatgtcagcattaaatcacactaaaaagtggaaatacccacaagttaatggtttaacttcgattaaatgggcagataacaactgttatcttgccactgcattgttaacactccaacaaatagagttgaagtttaatccacctgctctacaagatgcttattacagagcaagggctggtgaagctgctaacttttgtgcacttatcttagcctactgtaataagacagtaggtgagttaggtgatgttagagaaacaatgagttacttgtttcaacatgccaatttagattcttgcaaaagagtcttgaacgtggtgtgtaaaacttgtggacaacagcagacaacccttaagggtgtagaagctgttatgtacatgggcacactttcttatgaacaattcaagaaaggtgttcagataccttgtacgtgtggtaaacaagctacaaaatatctagtacaacaggagtcaccttttgttatgatgtcagcaccacctgctcagtatgaacttaagcatggtacatttacttgtgctagtgagtacactggtaattaccagtgtggtcactataagcatataacttctaaggaaactttgtattgcatagacggtgctttacttacaaagtcctcagaatacaaaggtcctattacggatgttttctacaaagaaaacagttacacaacaaccataaaaccagttacttataagttggatggtgttgtttgtacagaaattgaccctaagttggacaattattataagaaggacaactcttatttcacagagcaaccaattgatcttgtaccaaaccaaccatatccaaacgcaagcttcgataattttaagttcgtatgcgataatatcaaatttgctgatgatctcaaccagttaactggttataagaaacctgcttcaagagagcttaaagttacatttttccctgacttaaatggtgatgtggtggctattgattataaacactacacaccctcttttaagaaaggagctaaattgttacataagcctattgtttggcatgttaacaatgcaactaataaagccacgtataaaccaaatacctggtgtatacgttgtctttggagcacaaaaccagttgaaacatcaaattcgtttgatgtactgaagtcagaggacgcgcagggaatggataatcttgcatgtgaagatctaaaaccagtctctgaagaagtagtggaaaatcctaccatacagaaagacgttcttgagtgtaatgtgaaaactaccgaagttgtaggagacattatacttaaaccagcaaataatagtttgaagatcacagaagaggttggccacacagatctaatggctgcttatgtagacaattctagtcttactattaagaaacctaatgaactctctagagtattaggtttgaaaacccttgctactcatggtttagctgctgttaatagtgtcccttgggatactatagctaattatgctaagccttttcttaacaaagttgttagtacaactactaacatagttacacggtgtcttaatcgtgtttgtactaattatatgccttacttctttactttattgctacaattgtgtacttttactagaagtacaaattctagaatcaaggcatctatgccgactactatagcaaagaatactgttaagagtgtcggtaaattttgtctagaggcttcatttaattatctcaagtcacctaacttttctaagctgataaacattatcatctggtttttgctattaagtgtttgcctaggttctttaatctactcaaccgctgctttaggtgttttaatgtctaatttaggcatgccttcttactgtactggttacagagaaggctatttgaactctactaatgtcactattgcaacctactgtactggatctataccttgtagtgtttgtcttagtggtttagattctttagacacctatccttctcttgaaactatacagattaccatttcatctttcaaatgggatttaactgcttttggcttagttgcagagtggtttttggcatatattcttttcactaggtttttctatgtacttggattggctgcaatcatgcaattgtttttcagctattttgcagtccattttattagtaactcttggcttatgtggcttataattaatcttgtgcagatggccccgatttcagctatggttagaatgtacatcttctttgcctcattttattatgtgtggaaaagttatgtgcatgttgtagacggttgtaattcatcaacttgtatgatgtgttacaaacgtaatagagcaacaagagtcgaatgtacaactattgttaatggtgttagaaggtccttttatgtctatgctaatggaggtaaaggcttttgcaaactacacaattggaattgtgttaattgtgatacattctgtgctggtagtacatttattagtgatgaagttgcgagagacttgtcactacagtttaaaagaccaataaatcctactgaccaatcttcttacatcgttgatagtgttacagtgaagaatggttccatccatctttactttgataaagctggtcaaaagacttatgaaagacattctctctctcattttgttaacttagacaacctgagagctaataacactaaaggttcattgcctattaatgttatcgttttcgacggtaaatcaaaatgtgaagaatcatctgcaaaatcagcgtctgtttactacagtcagcttatgtgtcaacctatactgttactagatcaggcattagtgtctgatgttggtgatagtgcggaagttgcagttaaaatgtttgatgcttacgttaatacgttttcatcaacttttaacgtaccaatggaaaaactcaaaacactagttgcaactgcagaagctgaacttgcaaagaatgtgtccttagacaatgtcttatctacgtttatttcagcagctcggcaagggtttgttgattcagatgtagaaactaaagatgttgttgaatgtcttaaattgtcacatcaatctgacatagaagttactggcgatagttgtaataactatatgctcacctataacaaagttgaaaacatgacaccccgtgaccttggtgcttgtattgactgtagtgctagacatattaatgcgcaggtagcaaaaagtcacaacattgctttgatatggaacgttaaagatttcatgtcattgtctgaacaactacgaaaacaaatacgtagtgctgctaaaaagaataacttacccttcaagttgacatgtgcaactactagacaagttgttaatgttgtaacaacaaagatagcacttaagggtggtaaaattgtgaataactggttgaagcagcttattaaagttacacttgtgttcctttttgttgctgctattttctatctgataacacctgttcatgtcatgtctaaacatactgacttttcaagtgaaatcataggatacaaggctattgatggtggtgtcactcgtgacatagcatctacagatacttgttttgctaacaaacatgctgattttgacacatggtttagccagcgtggtggtagttatactaatgacaaagcttgcccattgattgctgcagtcataacaagagaagtgggttttgtcgttcctggtttgcctggaacgatattacgcacaactaatggtgactttttgcatttcttacctagagtttttagtgcagttggtaacatctgttacacaccatcaaaacttatagagtacactgactttgcaacatcagcttgtgttttggctgctgaatgtacaatttttaaagacgcttctggtaagccagtaccatattgttatgataccaatgtactagaaggttctgttgcttatgaaagtttacgccctgacacacgttatgtgctcatggatggctctattattcaatttcctaacacctaccttgaaggttctgtaagagtggtaacaacttttgattctgagtactgtaggcacggcacttgtgaaagatcagaagctggtgtttgtgtatctactagtggtagatgggtacttaacaacgattattacagatctttaccaggagttttctgtggtgtagatgctgtaaatttgcttactaacatgtttacaccactaattcaacctattggtgctttggacatatcagcatctatagtagctggtggtattgtagctatcgtagtaacatgccttgcctactattttatgaggtttagacgtgcttttggtgaatacagtcatgtagttgcctttaatactctcctattccttatgtcattcactgtactctgtttaacaccagtttactcattcttacctggtgtttattctgttatttacctgtacttgacattttatctgactaatgatgtttcttttctcgcacatattcagtggatggttatgttcacacctttagtacctttctggataacaattgcttacatcatttgtatttccacaaagcatttctattggttctttagtaattacctaaagagacgtgtagtctttaatggtgtttcctttagtacttttgaagaagctgcgctgtgcacctttttgttaaataaggagatgtatctaaagttgcgtagtgatgtgctattacctcttacgcaatataatagatacttagctctttataacaagtacaagtatttcagtggagcaatggatacaactagctacagagaagctgcttgttgtcatctcgcaaaggctctcaatgacttcagtaactcaggttctgatgttctttaccaaccaccacaaacctctatcacctcagctgttttgcagagtggttttagaaaaatggcattcccatctggtaaagttgagggttgtatggtacaagtaacttgtggtacaactacacttaacggtctttggcttgatgacgtagtttactgtccaagacatgtgatctgcacctctgaagatatgcttaaccctaattatgaagatctactcatccgtaagtctaatcataacttcttggtacaggctggtaatgttcaactcagggttattggacattctatgcaaaattgtgtacttaagcttaaggttgatacagccaatcctaagacacctaagtataagtttgttcgcattcaaccaggacagactttttcagtgttagcttgttacaatggttcaccatctggtgtttaccaatgtgctatgaggcccaatttcactattaagggttcattccttaatggttcatgtggtagtgttggttttaacatagattatgactgtgtctctttttgttacatgcaccatatggaattaccaactggagttcatgctggcacagacttagaaggtaacttttatggaccttttgttgacaggcaaacagcacaagcagctggtacagatacaactattacagttaatgttcttgcttggttgtacgctgctgttataaatggagacaggtggtttctcaatcgatttaccacaactcttaatgactttaaccttgtggctatgaagtacaattatgaacctctaacacaagaccatgttgacatactaggacctctttctgctcaaactggaattgccgttttagatatgtgtgcttcattaaaagaacttctgcaaaatggtatgaatggacgtaccatattgggtagtgctttattagaagatgagtttacaccttttgatgttgttagacaatgctcaggtgttactttccaaagtgcagtgaaaagaacaatcaagggtacacaccactggttgttactcacaattttgacttcacttttagttttagtccagagtactcaatggtctttgttctttttcttctacgaaaatgcctttttaccttttgctatgggtattattgctatgtctgcttttgcaatgatgtttgtcaaacataagcatgcatttctctgtttgtttttgttaccttctcttgccactgtagcttactttaatatggtctacatgcctgctagttgggtgatgcgtattatgacatggttggatatggttgatactagtttgtctggttttaagctaaaagactgtgttatgtatgcatcagctgtagtgttactaatccttatgacagcaagaactgtgtatgatgatggtgctaggagagtgtggacacttatgaatgtcttgacactcgtttataaagtttactatggcaacgctttagatcaagccatttccatgtgggctcttataatctctgttacttctaactactcaggtgtagttacaactgtcatgtttttggccagaggtattgtttttatgtgtgttgagtattgccctattttcttcataactggtaatacacttcagtgtataatgctagtctattgtttcttaggctatttttgtacttgttacttcggcctcttttgtttactcaaccgctactttagactgactcttggtgtttatgattacttagtgtctacacaggagtttagatatatgaattcacagggactactcccacccaagaatagcatagatgccttcaaactcaacattaaattgttgggtgttggtggcaaaccttgtatcaaagtagccactgtacagtctaaaatgtcagatgtaaagtgcacatcagtagtcttactctcagttttgcaacaactcagagtagaatcatcatctaaattgtgggctcaatgtgtccagttacacaatgacattctcttagctaaagatactactgaagcctttgaaaaaatggtttcactactttctgttttgctttccatgcagggtgctgtagacataaacaagctttgtgaagaaatgctggacaacagggcaaccttacaagctatagcctcagagtttagttcccttccatcatatgcagcttttgctactgctcaagaagcttatgagcaggctgttgctaatggtgattctgaagttgttcttaaaaagttgaagaagtctttgaatgtggctaaatctgaatttgaccgtgatgcagccatgcaacgtaagttggaaaagatggctgatcaagctatgacccaaatgtataaacaggctagatctgaggacaagagggcaaaagttactagtgctatgcagacaatgcttttcactatgcttagaaagttggataatgatgcactcaacaacattatcaacaatgcaagagatggttgtgttcccttgaacataatacctcttacaacagcagccaaactaatggttgtcataccagactacaacacatataagaatacgtgtgatggtacaacatttacttatgcatcagcattgtgggaaatccaacaggttgtagatgcagatagtaaaattgttcagcttagtgaaattagtatggacaattcacctaatttagcatggcctcttattgtaacagctttaagggccaattctgctgtcaaattacagaataatgagcttagtcctgttgcactaagacaaatgtcttgtgctgccggtactacacaaactgcttgcactgatgacaatgcgttagcttactacaacacaacaaagggaggtaggtttgtacttgcactgttatccgatttacaggatttgaaatgggctagattccctaagagtgatggaactggtactatctatacagaactggaaccaccttgtaggtttgttacagacacacctaaaggtcctaaagtgaagtatctttacttcatcaaaggattaaacaacctaaatagaggtatggtacttggtagtttagctgccacagtacgtttacaagctggtaatgcaacagaagttcctgctaattcaactgtactttctttctgtgcttttgctgtagatgctgctaaagcttacaaagattatctagctagtgggggacaaccaatcactaattgtgttaagatgttgtgtacacacactggtactggtcaggcaataacagttacaccggaagccaatatggatcaagaatcctttggtggtgcatcgtgttgtctgtactgccgttgtcatatagatcatccaaatcctaaaggattttgtgacttaaaaggtaagtatgtacaaatacctacaacttgtgctaatgaccctgtgggttttacacttaaaaacacagtctgtaccgtctgcggtatgtggaaaggttatggttgtagttgtgatcaactccgcgaacccatgcttcagtcagctgatgcacaatcgtttttaaacgggtttgcggtgtaagtgcagcccgtcttacaccgtgcggcacaggcactagtactgatgtcgtatatagagcttttgacatctacaatgataaagtagctggttttgctaagttcctaaaaactaattgttgtcgcttccaagaaaaggacgaagatgacaatctcattgattcttactttgtagttaagagacacactttctctaactaccaacatgaagaaacaatttacaacctgcttaaggattgtccagctgttgctaaacatgacttctttaagtttagaatagacggtgacatggtaccacatatatcacgtcaacgtcttactaaatacacaatggcagacctcgtctatgctttaaggcattttgatgaaggtaattgtgacacattaaaagaaatacttgtcacatacaattgttgtgatgatgactacttcaataaaaaggactggtatgattttgtagaaaacccagatatattacgcgtatacgccaacttaggtgaacgtgtacgccaagctttgttaaaaacagtacagttctgtgatgccatgcgaaatgctggtattgttggtgtactgacattagataatcaagatctcaatggtaactggtatgactttggtgatttcatacaaaccacgccaggtagtggagttcctgttgtagactcttattattcattgctcatgcctatattaaccttgaccagggctttaactgcagagtcacatgttgacactgacttaacaaagccttacattaagtgggatttgttaaaatacgacttcacggaagagaggttaaaactctttgaccgttattttaaatactgggatcagacataccacccaaattgtgttaactgtttggatgacagatgcattctgcattgtgcaaactttaatgttctgttctctacagtgttcccacctacaagttttggaccactagtgagaaaaatatttgttgatggtgttccatttgtagtttcaactggataccacttcagagagctaggtgttgtacataatcaggatgtaaacttacatagctctagacttagttttaaggaattacttgtgtatgctgctgatcctgctatgcatgctgcttctggtaatctattactagataaacgcactacgtgcttttcagtagctgcacttactaacaatgttgcttttcaaactgtcaaacccggtaattttaacaaggacttctatgactttgctgtgtctaagggtttctttaaggaaggaagttctgttgaattaaaacacttcttctttgctcaggatggtaatgctgctatcagcgattatgactactatcgttataatctaccaacaatgtgtgatatcagacaactactatttgtagttgaagttgttgataagtactttgattgttacgatggtggctgtattaatgctaaccaagtcatcgtcaacaacctagacaaatcagctggttttccatttaataaatggggtaaggctagactttattatgattccatgagttatgaggatcaagatgcacttttcgcatatacaaaacgtaatgtcatccctactataactcaaatgaaccttaagtatgccattagtgcaaagaatagagctcgcaccgtagctggtgtctctatctgtagtactatgaccaatagacagtttcatcaaaaattactcaagtcaatagccgccactagaggagctactgtagtaattggaacaagcaaattctatggtggttggcacaacatgctcaaaactgtttatagtgatgtagaaaaccctcaccttatgggttgggattatcctaaatgtgatagagccatgcctaacatgcttagaattatggcctcacttgttcttgctcgcaaacatacaacgtgttgtagcttgtcacaccgtttctatagattagctaatgagtgtgctcaagtattgagtgaaatggtcatgtgtggcggttcactatatgttaaaccaggtggaacctcatcaggagatgccacaactgcttatgctaatagtgtgtttaacatttgtcaagctgtcacggccaatgttaatgcacttttatctactgatggtaacaaaattgccgataagtatgtccgcaatttacaacacagactttatgagtgtctctatagaaatagagatgttgacacagactttgtgaatgagttttacgcatatttgcgtaaacatttctcaatgatgatactctctgacgatgctgttgtgtgtttcaatagcacttatgcatctcaaggtctagtggctagcataaagaactttaagtcagttctttactatcaaaacaacgtttttatgtctgaagcaaaatgttggactgagactgaccttactaaaggacctcatgaattttgctctcaacatacaatgctagttaaacagggtgatgattatgtgtaccttccttacccagatccatcaagaatcctaggtgccggttgttttgtagatgatatcgtaaaaacagatggtacacttatgattgaacggttcgtgtctttagctatagatgcttacccacttactaaacatcctaatcaggagtatgctgatgtctttcatttgtacttacaatacatacgtaagctacatgatgagttaacaggacacatgttagacatgtattctgttatgcttactaatgataacacttcaaggtattgggaacctgagttttatgaggctatgtacacaccgcatacagtcttacaagctgttggtgcttgtgttctttgcaattcacagacttcattaagatgtggtgcttgcatacgtagaccattcttatgttgtaaatgctgttacgaccatgtcatctcaacatcacataaattagtcttgtctgttaatccgtatgtttgcaatgctccaggttgtgatgtcacagatgtgactcaactttacttaggaggtatgagctattactgtaagtcacataaaccacccattagttttccattgtgtgctaatggacaagtttttggtctctacaagaatacatgtgttggtagcgataatgttactgactttaatgcaattgcaacatgtgactggacaaatgctggtgattacattttagctaacacctgtactgaaagactcaagctttttgcagcagaaacgctcaaagctactgaggagacatttaaactgtcttatggtattgctactgtacgtgaagtgctgtctgacagagaattacatctttcatgggaagttggtaaacctagaccaccacttaaccgaaattatgtctttactggttatcgtgtaactaaaaacagtaaagtgcaaatcggagagtacacctttgaaaaaggtgactatggtgatgctgttgtttaccgaggtacaacaacttacaaactcaacgttggtgattattttgtgctgacatcacatacagtaatgccattaagtgcacctacactagtgccacaagagcactatgttagaattactggcttatacccaacactcaatatctcagatgagttttctagcaatgttgcaaattatcaaaaggttggtatgcaaaagtattctacactccagggaccacctggtactggtaaaagtcattttgctattggtctagctctctactacccttctgctcgcatagtatatacagcttgctctcatgcagctgttgatgcactatgtgagaaggcattaaaatatttgcccatagacaaatgtagtagaattatacctgcacgtgctcgtgtagagtgttttgataaattcaaggtgaattcaacattagaacagtatgtcttttgtactgtaaatgcattgcctgagacgacagcagatatagttgtctttgatgaaatttcaatggccacaaattatgatttgagtgttgtcaatgccagattacgtgctaagcactatgtgtacattggtgatcctgctcaattacctgcaccacgcacattactaactaagggtacactagaaccagaatatttcaattcagtgtgtagacttatgaaaactataggtccagacatgttcctcggaacttgtcgtagatgtcctgctgaaattgttgacactgtgagtgctttggtttatgataataagcttaaggcacataaagacaaatcagctcaatgctttaaaatgttctacaagggtgttatcacgcatgatgtttcatctgcaattaacaggccacaaataggcgtggtaagagaattccttacacgtaaccctgcttggagaaaagctgtctttatttcaccttacaattcccagaatgctgtagcctcaaagattttgggactaccaactcaaactgttgattcatcacagggctcagaatatgactatgtcatattcactcaaaccactgaaacagctcactcttgtaatgtaaacagattcaacgttgctattaccagagcaaaagtaggcatactttgcataatgtctgatagagacctttatgacaagttgcaatttacaagtcttgaaattccacgtaggaatgtggcaactttacaagctgaaaatgtaacaggactctttaaagattgtagtaaggtaatcactgggttacatcctacacaggcacctacacacttaagtgttgatactaaattcaaaactgaaggtttatgtgttgacatacctggcatacctaaggacatgacctatagaagattaatctctatgatgggtttcaaaatgaattaccaggttaatggttaccctaacatgtttatcacccgcgaagaagctataagacatgtacgtgcatggattggcttcgatgtcgaaggttgtcatgctactagagaagctgttggtaccaatttacctttacagctaggtttttctacaggtgttaacctagttgctgtacctacaggttatgttgatacacctaataatacagatttttccagagttagtgctaaaccaccgcctggagatcaatttaaacacctcataccacttatgtacaaaggacttccttggaatgtagtgcgtataaagattgtccaaatgttaagtgacacacttaaaaatctctctgacagagtcgtatttgtcttatgggcacatggctttgagttgacatctatgaagtattttgtgaagatcggacctgagcgcacatgttgtctatgtgatagacgtgctacatgcttttccactgcttcagacacttatgcctgttggcatcattctattggatttgattacgtctataatccgtttatgattgatgttcaacaatggggttttacaggtaacctacaaagcaaccatgatctgtattgtcaagtccatggtaatgcacatgtagctagttgtgatgcaatcatgactaggtgtctagctgtccacgagtgctttgttaagcgtgttgactggactattgaatatcctataatcggtgatgaactgaagattaatgcggcttgtagaaaggttcaacacatggttgttaaagctgcattattagcagacaaattcccagttcttcacgacattggtaaccctaaagctattaagtgtgtacctcaagctgatgtagaatggaagttctatgatgcacagccttgtagtgacaaagcttacaaaatagaagaactgttctattcttatgccacacattctgacaaattcacagatggtgtatgcctattttggaattgcaatgtcgatagatatcctgctaattccattgtttgtagatttgacactagagtgctatctaaccttaacttgcctggttgtgatggtggcagtttgtatgtaaataagcatgcattccacacaccagcttttgataaaagtgcttttgttaatctaaagcaacttccatttttctattactctgacagtccatgtgagtctcatggaaaacaagtagtgtcagatatagattatgtaccactaaagtctgctacgtgtataacacgttgcaatttaggtggtgctgtctgtagacatcatgctaatgagtacagattgtatctcgatgcttataacatgatgatctcagctggctttagcttgtgggtttacaaacaatttgatacctataacctctggaacacttttacaagacttcagagtttagaaaatgtggcttttaatgttgtaaataagggacactttgatggacaacagggtgaagtaccagtttctatcattaacaacactgtttacacaaaagttgatggtgttgatgtagaattgtttgagaacaaaaccacattacctgttaatgtagcatttgagctttgggctaagcgcaacattaaaccagtaccagaggtgaaaatactcaataatttgggtgtggacattgctgctaatactgtgatctgggactacaaaagagatgctccagcacatatatctactattggtgtttgttctatgactgacatagccaagaaaccaactgaaacgatttgtgcaccactcactgtcttttttgatggtagagttgatggtcaagtagacttatttagaaatgcccgtaatggtgttcttattacagaaggtagtgttaaaggtttacaaccatctgtaggtcccaaacaagctagtcttaatggagtcacattaattggagaagccgtaaaaacacagttcaattattacaagaaagtggatggtgttgtccaacaattacctgaaacttactttactcagagtagaaacttacaggaatttaagcccaggagtcaaatggaaattgatttcttagaacttgctatggatgaattcattgaacggtataaattagaaggctatgccttcgaacatatcgtttatggagattttagtcatagtcagttaggtggtttacatctactgattggactagctaaacgttttaaggaatcaccttttgaacttgaagattttattcctatggacagtacagttaaaaactacttcataacagatgcgcaaacaggttcatctaagtgtgtgtgttctgttattgatcttttacttgatgacttcgttgaaataataaagtcccaagatttatctgtagtttctaaggttgtcaaagtgactattgactatacagaaatctcatttatgctttggtgtaaagatggccatgtagaaacattttacccaaaattacaatctagtcaagcgtggcaaccgggtgttgctatgcctaatctttacaaaatgcaaagaatgctattagaaaagtgtgaccttcaaaattatggtgatagtgcaacattacctaaaggcataatgatgaatgtcgcaaaatatactcaactgtgtcaatatttaaacacactgacattagctgtaccctataatatgagagttatccattttggtgctggttctgataaaggagttgcaccaggtacagctgttttaagacaatggttgcctacaggtacgctgcttgtcgattcagatcttaatgactttgtctctgatgcagattcaactttgattggtgattgtgcaactgtacatacagctaataaatgggatctcattattagtgatatgtacgaccctaagactaagaatgtcacaaaagaaaacgactctaaagagggttttttcacttacatttgtgggtttatacaacaaaagctagctcttggaggttccgtggctataaagataacagaacattcttggaatgctgatctttataagctcatgggacacttcgcatggtggacagcctttgttactaatgtgaatgcgtcatcatctgaagcatttttaatcggatgtaactaccttggcaaaccacgcgaacaaatagatggttatgtcatgcatgcaaattacatattttggaggaatacaaatccaattcagctttcttcttattctttattcgacatgagtaaattcccccttaaattaaggggtactgctgttatgtctttaaaagaaggtcaaatcaatgatatgattctctctcttcttagtaaaggtagacttataattagagaaaacaacagagttgttatttctagtgatgttcttgttaacaactaa

SEQ ID NO: 52 - DNA, 828 bp, Artificial Sequence
  SARS-CoV-2 ORF3a
atggatttgtttatgagaatcttcacaattggaactgtaactttgaagcaaggtgaaatcaaggatgctactccttcagattttgttagagctactgcaacgataccgatacaagcatcacttcctttcggatggcttattgttggcgttgcacttcttgctgtttttcagagcgcttccaaaatcataaccctcaaaaagagatggcaactagcactctccaagggtgttcactttgtttgcaacttgctgttgttgtttgtaacagtttactcacatcttttgcttgttgctgctggccttgaagccccttttctctatctttatgctttagtctacttcttgcagagtataaactttgtacgcataataatgaggctttggctttgctggaaatgccgttccaaaaacccattactttatgatgccaactattttctttgctggcatactaattgttacgactattgtataccttacaatagtgtaacttcttcaattgtcattacttcaggtgatggcacaacaagtcctatttctgaacatgactaccagattggtggttatactgaaaaatgggaatctggagtaaaagactgtgttgtattacacagttacttcacttcagactattaccagctgtactcaactcaattgagtacagacactggtgttgaacatgttaccttcttcatctacaataaaatcgttgatgagcctgaagaacatgtccaaattcacacaatcgacgtttcatccggagttgttaatccagtaatggaaccaatttatgatgaaccgacgacgactactagcgtgcctttgtaa

SEQ ID NO: 53 - DNA, 186 bp, Artificial Sequence
  SARS-CoV-2 ORF6
atgtttcatctcgttgactttcaggttactatagcagagatattactaatcatcatgaggacttttaaagtttccatttggaatcttgattacatcataaacctcataattaagaacttaagcaagtcactaactgagaataaatattctcaactagacgaggagcagccaatggagattgattaa

SEQ ID NO: 54 - DNA, 366 bp, Artificial Sequence
  SARS-CoV-2 ORF7a
atgaaaattattcttttcttggcactgataacactcgctacttgtgagctttatcactaccaagagtgtgttagaggtacaacagtacttttaaaagaaccttgctcgtcgggaacatacgagggcaattcaccatttcatcctctagctgataacaaatttgcactgacttgctttagcactcaatttgcttttgcttgtcctgacggcgtaaaacacgtctatcagttacgtgccagatcagtttcacctaaactgttcatcagacaagaggaagttcaagaactttactctccaatttttcttattgttgcggcaatagtgtttataacactttgcttcacactcaaaagaaagacagaatga

SEQ ID NO: 55 - DNA, 366 bp, Artificial Sequence
  SARS-CoV-2 ORF8
atgaaatttcttgttttcttaggaatcatcacaactgtagctgcatttcaccaagaatgtagtttacagtcatgtactcaacatcaaccatatgtagttgatgacccgtgtcctattcacttctattctaaatggtatatcagagtaggagctagaaaatcagcacctttaattgaattgtgcgtggatgaggctggttctaaatcacccattcagtacatcgatatcggtaattatacagtttcctgtttaccttttacaattaactgccaggaacctaaattgggtagtcttgtagtgcgttgttcgttctacgaggactttttagagtatcatgacgttcgtgttgttttagatttcatctaa

SEQ ID NO: 56 - DNA, 265 bp, Artificial Sequence
  SARS-CoV-2 5'UTR
attaaaggtttataccttcccaggtaacaaaccaaccaactttcgatctcttgtagatctgttctctaaacgaactttaaaatctgtgtggctgtcactcggctgcatgcttagtgcactcacgcagtataattaataactaattactgtcgttgacaggacacgagtaactcgtctatcttctgcaggctgcttacggtttcgtccgtgttgcagccgatcatcagcacatctaggtttcgtccgggtgtgaccgaaaggtaag

SEQ ID NO: 57 - DNA, 206 bp, Artificial Sequence
  SARS-CoV-2 3'UTR
caatctttaatcagtgtgtaacattagggaggacttgaaagagccaccacattttcaccgaggccacgcggagtacgatcgagtgtacagtgaacaatgctagggagagctgcctatatggaagagccctaatgtgtaaaattaattttagtagtgctatccccatgtgattttaatagcttcttaggagaatgacaaaaaaaaac

SEQ ID NO: 58 - DNA, 13203 bp, Artificial Sequence
  SARS-CoV-2 orf1a
atggagagccttgtccctggtttcaacgagaaaacacacgtccaactcagtttgcctgttttacaggttcgcgacgtgttagtacgtggttttggagattcagtggaagaagtcttatcagaggcacgtcaacatcttaaagatggcacttgtggcttagtagaagttgaaaaaggcgttttgcctcaacttgaacagccctatgtgttcatcaaacgttctgatgctagaactgcacctcatggtcatgttatggttgagctggtagcagaattagaaggtattcagtacggtcgtagtggtgagacattaggtgttttagttcctcatgtgggcgaaataccagtggcttaccgcaaagttcttcttagaaagaacggtaataaaggagctggtggccatagttacggcgctgatttaaagtcatttgacttaggcgacgagcttggcactgatccttatgaagatttccaagaaaactggaacactaaacatagcagtggtgttacccgtgaactcatgcgtgagttaaatggaggtgcatacactcgctatgtcgataacaacttctgtggacctgatggttaccctcttgagtgcattaaagaccttctagcacgtgctggtaaagcttcatgcactttgtccgaacaactggactttattgacactaagaggggtgtatactgctgccgtgaacatgagcatgaaattgcttggtacacggaacgttctgaaaagagctatgaattgcagacaccttttgaaattaaactggcaaagaaatttgacaccttcaatggggaatgtccaaattttgtatttcccctcaattccataatcaagactattcaaccaagggttgaaaagaaaaagcttgatggctttatgggtagaattcgatctgtctatccagttgcgtcaccaaatgaatgcaaccaaatgtgcctttcaactctcatgaagtgtgatcattgtggtgaaacttcatggcagacgggcgattttgttaaagccacttgcgaattttgtggcactgagaatttgactaaagaaggtgccactacttgtggttacttaccccaaaatgctgttgttaaaatttactgtccagcatgtcacaattcagaagtaggacctgagcatagtcttgccgaataccataatgaatctggcttgaaaaccattcttcgtaagggtggtcgcactattgcttttggaggatgtgtgttctcttatgttggttgccataacaagtgtgcttattgggttccacgtgcttcagctaacataggttgtaaccatacaggtgttgttggagaaggttccgaaggtcttaatgacaaccttcttgaaatactccaaaaagagaaagtcaacatcaatattgttggtgactttaaacttaatgaagagatcgccattattttggcatctttttctgcttccacaagtgcttttgtggaaactgtgaaaggtttggattataaagcattcaaacagattgttgaatcctgtggtaattttaaggttacaaagggaaaagctaaaaaaggtgcctggaatattggtgaacagaaatcaatactgagtcctctttatgcatttgcatcagaggctgctcgtgttgtacgatcaattttctcccgcactcttgaaactgctcaaaattctgtgcgtgttttacagaaggccgctataacaatactagatggaatttcacagtattcactgagactcattgatgctatgatgttcacatctgatttggctactaacaatctagttgtaatggcctacattacaggtggtgttgttcagttgacttcgcagtggctaactaacatctttggcactgtttatgaaaaactcaaacccgtccttgattggcttgaagagaagtttaaggaaggtgtagagtttcttagagacggttgggagattgttaaattcatctcaacctgtgcttgtgaaattgtcggtggacaaattgtcacctgtgctaaggaaattaaggagagtgttcagacattctttaagcttgtaaacaagtttttggctttgtgtgctgactctatcattattggtggagctaaacttaaagccttgaatttaggtgaaacatttgtcacgcactcaaagggattgtacagaaagtgtgttaaatccagagaagaaactggcctactcatgcctctaaaagccccaaaagaaattatcttcttagagggagaaacacttcccacagaagtgttaacagaggaagttgtcttgaaaactggtgatttacaaccattagaacaacctactagtgaagctgttgaagctccattggttggtacaccagtttgtattaacgggcttatgttgctcgaaatcaaagacacagaaaagtactgtgcccttgcacctaatatgatggtaacaaacaataccttcacactcaaaggcggtgcaccaacaaaggttacttttggtgatgacactgtgatagaagtgcaaggttacaagagtgtgaatatcacttttgaacttgatgaaaggattgataaagtacttaatgagaagtgctctgcctatacagttgaactcggtacagaagtaaatgagttcgcctgtgttgtggcagatgctgtcataaaaactttgcaaccagtatctgaattacttacaccactgggcattgatttagatgagtggagtatggctacatactacttatttgatgagtctggtgagtttaaattggcttcacatatgtattgttctttctaccctccagatgaggatgaagaagaaggtgattgtgaagaagaagagtttgagccatcaactcaatatgagtatggtactgaagatgattaccaaggtaaacctttggaatttggtgccacttctgctgctttacaacctgaagaagaacaagaagaagattggttagatgatgatagtcaacaaactgttggtcaacaagacggcagtgaggacaatcagacaactactattcaaacaattgttgaggttcaacctcaattagagatggaacttacaccagttgttcagactattgaagtgaatagttttagtggttatcttaaacttactgacaatgtatacatcaagaatgcagacattgtggaagaagctaaaaaggtaaaaccaacagtggttgttaatgcagccaatgtttaccttaaacatggaggaggtgttgcaggagccttaaataaggctactaacaatgccatgcaagttgaatctgatgattacatagctactaatggaccacttaaagtgggtggtagttgtgttttaagcggacacaatcttgctaaacactgtttacatgttgtcggcccaaatgttaacaaaggtgaagatattcaacttcttaagagtgcttatgaaaattttaaccagcacgaagttctacttgcaccattattatcagctggtatttttggtgctgaccctatacattctttaagagtttgtgtagatactgttcgcacaaatgtctacttagctgtctttgataaaaatctctatgacaaacttgtttcaagctttttggaaatgaagagtgaaaagcaagttgaacaaaagatcgctgagattcctaaagaggaagttaagccatttataactgaaagtaaaccttcagttgaacagagaaaacaagatgataagaagatcaaagcttgtgttgaagaagttacaacaactctggaagaaactaagttcctcacagaaaacttgctcctttatatcgacattaatggcaatcttcatccagattctgccactcttgttagtgacattgacatcactttcttaaagaaagatgctccatatatagtgggtgatgttgttcaagagggtgttttaactgctgtggttatacctactaaaaaggctggtggcactactgaaatgctagcgaaagctttgagaaaagtgccaacagacaattatataaccacttacccgggtcagggtttaaatggttacactgtagaggaggcaaagacagtgcttaaaaagtgtaaaagtgccttttacattctaccatctattatctctaatgagaagcaagaaattcttggaactgtttcttggaatttgcgagaaatgcttgcacatgcagaagaaacacgcaaattaatgcctgtctgtgtggaaactaaagccatagtttcaactatacagcgtaaatataagggtatcaagatacaagagggtgtggttgattatggtgctagattttacttttacaccagtaaaacaactgtagcgtcacttatcaacacacttaacgatctaaatgaaactcttgttacaatgccacttggctatgtaacacatggcttaaatttggaagaagctgctcggtatatgagatctctcaaagtgccagctacagtttctgtttcttcacctgatgctgttacagcgtataatggttatcttacttcttcttctaaaacacctgaagaacattttattgaaaccatctcacttgctggttcctataaagattggtcctattctggacaatctacacaactaggtatagaatttcttaagagaggtgataaaagtgtatattacacgtccaatcctaccacattccacctagatggtgaagttatcacctttgacaatcttaagacacttctttctttgagagaagtgaggactattaaggtgtttacaacagtagacaacattaacctccacacgcaagttgtggacatgtcaatgacatatggacaacagtttggtccaacttatttggatggagctgatgttactaagataaaacctcataactcacatgaaggtaaaacattttacgttttgcctaatgatgacactctacgtgttgaggcttttgagtactaccacacaactgatcctagttttctgggtaggtacatgtcagcattaaatcacactaaaaagtggaaatacccacaagttaatggtttaacttcgattaaatgggcagataacaactgttatcttgccactgcattgttaacactccaacaaatagagttgaagtttaatccacctgctctacaagatgcttattacagagcaagggctggtgaagctgctaacttttgtgcacttatcttagcctactgtaataagacagtaggtgagttaggtgatgttagagaaacaatgagttacttgtttcaacatgccaatttagattcttgcaaaagagtcttgaacgtggtgtgtaaaacttgtggacaacagcagacaacccttaagggtgtagaagctgttatgtacatgggcacactttcttatgaacaattcaagaaaggtgttcagataccttgtacgtgtggtaaacaagctacaaaatatctagtacaacaggagtcaccttttgttatgatgtcagcaccacctgctcagtatgaacttaagcatggtacatttacttgtgctagtgagtacactggtaattaccagtgtggtcactataagcatataacttctaaggaaactttgtattgcatagacggtgctttacttacaaagtcctcagaatacaaaggtcctattacggatgttttctacaaagaaaacagttacacaacaaccataaaaccagttacttataagttggatggtgttgtttgtacagaaattgaccctaagttggacaattattataagaaggacaactcttatttcacagagcaaccaattgatcttgtaccaaaccaaccatatccaaacgcaagcttcgataattttaagttcgtatgcgataatatcaaatttgctgatgatctcaaccagttaactggttataagaaacctgcttcaagagagcttaaagttacatttttccctgacttaaatggtgatgtggtggctattgattataaacactacacaccctcttttaagaaaggagctaaattgttacataagcctattgtttggcatgttaacaatgcaactaataaagccacgtataaaccaaatacctggtgtatacgttgtctttggagcacaaaaccagttgaaacatcaaattcgtttgatgtactgaagtcagaggacgcgcagggaatggataatcttgcatgtgaagatctaaaaccagtctctgaagaagtagtggaaaatcctaccatacagaaagacgttcttgagtgtaatgtgaaaactaccgaagttgtaggagacattatacttaaaccagcaaataatagtttgaagatcacagaagaggttggccacacagatctaatggctgcttatgtagacaattctagtcttactattaagaaacctaatgaactctctagagtattaggtttgaaaacccttgctactcatggtttagctgctgttaatagtgtcccttgggatactatagctaattatgctaagccttttcttaacaaagttgttagtacaactactaacatagttacacggtgtcttaatcgtgtttgtactaattatatgccttacttctttactttattgctacaattgtgtacttttactagaagtacaaattctagaatcaaggcatctatgccgactactatagcaaagaatactgttaagagtgtcggtaaattttgtctagaggcttcatttaattatctcaagtcacctaacttttctaagctgataaacattatcatctggtttttgctattaagtgtttgcctaggttctttaatctactcaaccgctgctttaggtgttttaatgtctaatttaggcatgccttcttactgtactggttacagagaaggctatttgaactctactaatgtcactattgcaacctactgtactggatctataccttgtagtgtttgtcttagtggtttagattctttagacacctatccttctcttgaaactatacagattaccatttcatctttcaaatgggatttaactgcttttggcttagttgcagagtggtttttggcatatattcttttcactaggtttttctatgtacttggattggctgcaatcatgcaattgtttttcagctattttgcagtccattttattagtaactcttggcttatgtggcttataattaatcttgtgcagatggccccgatttcagctatggttagaatgtacatcttctttgcctcattttattatgtgtggaaaagttatgtgcatgttgtagacggttgtaattcatcaacttgtatgatgtgttacaaacgtaatagagcaacaagagtcgaatgtacaactattgttaatggtgttagaaggtccttttatgtctatgctaatggaggtaaaggcttttgcaaactacacaattggaattgtgttaattgtgatacattctgtgctggtagtacatttattagtgatgaagttgcgagagacttgtcactacagtttaaaagaccaataaatcctactgaccaatcttcttacatcgttgatagtgttacagtgaagaatggttccatccatctttactttgataaagctggtcaaaagacttatgaaagacattctctctctcattttgttaacttagacaacctgagagctaataacactaaaggttcattgcctattaatgttatcgttttcgacggtaaatcaaaatgtgaagaatcatctgcaaaatcagcgtctgtttactacagtcagcttatgtgtcaacctatactgttactagatcaggcattagtgtctgatgttggtgatagtgcggaagttgcagttaaaatgtttgatgcttacgttaatacgttttcatcaacttttaacgtaccaatggaaaaactcaaaacactagttgcaactgcagaagctgaacttgcaaagaatgtgtccttagacaatgtcttatctacgtttatttcagcagctcggcaagggtttgttgattcagatgtagaaactaaagatgttgttgaatgtcttaaattgtcacatcaatctgacatagaagttactggcgatagttgtaataactatatgctcacctataacaaagttgaaaacatgacaccccgtgaccttggtgcttgtattgactgtagtgctagacatattaatgcgcaggtagcaaaaagtcacaacattgctttgatatggaacgttaaagatttcatgtcattgtctgaacaactacgaaaacaaatacgtagtgctgctaaaaagaataacttacccttcaagttgacatgtgcaactactagacaagttgttaatgttgtaacaacaaagatagcacttaagggtggtaaaattgtgaataactggttgaagcagcttattaaagttacacttgtgttcctttttgttgctgctattttctatctgataacacctgttcatgtcatgtctaaacatactgacttttcaagtgaaatcataggatacaaggctattgatggtggtgtcactcgtgacatagcatctacagatacttgttttgctaacaaacatgctgattttgacacatggtttagccagcgtggtggtagttatactaatgacaaagcttgcccattgattgctgcagtcataacaagagaagtgggttttgtcgttcctggtttgcctggaacgatattacgcacaactaatggtgactttttgcatttcttacctagagtttttagtgcagttggtaacatctgttacacaccatcaaaacttatagagtacactgactttgcaacatcagcttgtgttttggctgctgaatgtacaatttttaaagacgcttctggtaagccagtaccatattgttatgataccaatgtactagaaggttctgttgcttatgaaagtttacgccctgacacacgttatgtgctcatggatggctctattattcaatttcctaacacctaccttgaaggttctgtaagagtggtaacaacttttgattctgagtactgtaggcacggcacttgtgaaagatcagaagctggtgtttgtgtatctactagtggtagatgggtacttaacaacgattattacagatctttaccaggagttttctgtggtgtagatgctgtaaatttgcttactaacatgtttacaccactaattcaacctattggtgctttggacatatcagcatctatagtagctggtggtattgtagctatcgtagtaacatgccttgcctactattttatgaggtttagacgtgcttttggtgaatacagtcatgtagttgcctttaatactctcctattccttatgtcattcactgtactctgtttaacaccagtttactcattcttacctggtgtttattctgttatttacctgtacttgacattttatctgactaatgatgtttcttttctcgcacatattcagtggatggttatgttcacacctttagtacctttctggataacaattgcttacatcatttgtatttccacaaagcatttctattggttctttagtaattacctaaagagacgtgtagtctttaatggtgtttcctttagtacttttgaagaagctgcgctgtgcacctttttgttaaataaggagatgtatctaaagttgcgtagtgatgtgctattacctcttacgcaatataatagatacttagctctttataacaagtacaagtatttcagtggagcaatggatacaactagctacagagaagctgcttgttgtcatctcgcaaaggctctcaatgacttcagtaactcaggttctgatgttctttaccaaccaccacaaacctctatcacctcagctgttttgcagagtggttttagaaaaatggcattcccatctggtaaagttgagggttgtatggtacaagtaacttgtggtacaactacacttaacggtctttggcttgatgacgtagtttactgtccaagacatgtgatctgcacctctgaagatatgcttaaccctaattatgaagatctactcatccgtaagtctaatcataacttcttggtacaggctggtaatgttcaactcagggttattggacattctatgcaaaattgtgtacttaagcttaaggttgatacagccaatcctaagacacctaagtataagtttgttcgcattcaaccaggacagactttttcagtgttagcttgttacaatggttcaccatctggtgtttaccaatgtgctatgaggcccaatttcactattaagggttcattccttaatggttcatgtggtagtgttggttttaacatagattatgactgtgtctctttttgttacatgcaccatatggaattaccaactggagttcatgctggcacagacttagaaggtaacttttatggaccttttgttgacaggcaaacagcacaagcagctggtacagatacaactattacagttaatgttcttgcttggttgtacgctgctgttataaatggagacaggtggtttctcaatcgatttaccacaactcttaatgactttaaccttgtggctatgaagtacaattatgaacctctaacacaagaccatgttgacatactaggacctctttctgctcaaactggaattgccgttttagatatgtgtgcttcattaaaagaacttctgcaaaatggtatgaatggacgtaccatattgggtagtgctttattagaagatgagtttacaccttttgatgttgttagacaatgctcaggtgttactttccaaagtgcagtgaaaagaacaatcaagggtacacaccactggttgttactcacaattttgacttcacttttagttttagtccagagtactcaatggtctttgttctttttcttctacgaaaatgcctttttaccttttgctatgggtattattgctatgtctgcttttgcaatgatgtttgtcaaacataagcatgcatttctctgtttgtttttgttaccttctcttgccactgtagcttactttaatatggtctacatgcctgctagttgggtgatgcgtattatgacatggttggatatggttgatactagtttgtctggttttaagctaaaagactgtgttatgtatgcatcagctgtagtgttactaatccttatgacagcaagaactgtgtatgatgatggtgctaggagagtgtggacacttatgaatgtcttgacactcgtttataaagtttactatggcaacgctttagatcaagccatttccatgtgggctcttataatctctgttacttctaactactcaggtgtagttacaactgtcatgtttttggccagaggtattgtttttatgtgtgttgagtattgccctattttcttcataactggtaatacacttcagtgtataatgctagtctattgtttcttaggctatttttgtacttgttacttcggcctcttttgtttactcaaccgctactttagactgactcttggtgtttatgattacttagtgtctacacaggagtttagatatatgaattcacagggactactcccacccaagaatagcatagatgccttcaaactcaacattaaattgttgggtgttggtggcaaaccttgtatcaaagtagccactgtacagtctaaaatgtcagatgtaaagtgcacatcagtagtcttactctcagttttgcaacaactcagagtagaatcatcatctaaattgtgggctcaatgtgtccagttacacaatgacattctcttagctaaagatactactgaagcctttgaaaaaatggtttcactactttctgttttgctttccatgcagggtgctgtagacataaacaagctttgtgaagaaatgctggacaacagggcaaccttacaagctatagcctcagagtttagttcccttccatcatatgcagcttttgctactgctcaagaagcttatgagcaggctgttgctaatggtgattctgaagttgttcttaaaaagttgaagaagtctttgaatgtggctaaatctgaatttgaccgtgatgcagccatgcaacgtaagttggaaaagatggctgatcaagctatgacccaaatgtataaacaggctagatctgaggacaagagggcaaaagttactagtgctatgcagacaatgcttttcactatgcttagaaagttggataatgatgcactcaacaacattatcaacaatgcaagagatggttgtgttcccttgaacataatacctcttacaacagcagccaaactaatggttgtcataccagactacaacacatataagaatacgtgtgatggtacaacatttacttatgcatcagcattgtgggaaatccaacaggttgtagatgcagatagtaaaattgttcagcttagtgaaattagtatggacaattcacctaatttagcatggcctcttattgtaacagctttaagggccaattctgctgtcaaattacagaataatgagcttagtcctgttgcactaagacaaatgtcttgtgctgccggtactacacaaactgcttgcactgatgacaatgcgttagcttactacaacacaacaaagggaggtaggtttgtacttgcactgttatccgatttacaggatttgaaatgggctagattccctaagagtgatggaactggtactatctatacagaactggaaccaccttgtaggtttgttacagacacacctaaaggtcctaaagtgaagtatctttacttcatcaaaggattaaacaacctaaatagaggtatggtacttggtagtttagctgccacagtacgtttacaagctggtaatgcaacagaagttcctgctaattcaactgtactttctttctgtgcttttgctgtagatgctgctaaagcttacaaagattatctagctagtgggggacaaccaatcactaattgtgttaagatgttgtgtacacacactggtactggtcaggcaataacagttacaccggaagccaatatggatcaagaatcctttggtggtgcatcgtgttgtctgtactgccgttgtcatatagatcatccaaatcctaaaggattttgtgacttaaaaggtaagtatgtacaaatacctacaacttgtgctaatgaccctgtgggttttacacttaaaaacacagtctgtaccgtctgcggtatgtggaaaggttatggttgtagttgtgatcaactccgcgaacccatgcttcagtcagctgatgcacaatcgtttttaaac

SEQ ID NO: 59 - DNA, 8088 bp, Artificial Sequence
  SARS-CoV-2 orf1b
cgggtttgcggtgtaagtgcagcccgtcttacaccgtgcggcacaggcactagtactgatgtcgtatatagagcttttgacatctacaatgataaagtagctggttttgctaagttcctaaaaactaattgttgtcgcttccaagaaaaggacgaagatgacaatctcattgattcttactttgtagttaagagacacactttctctaactaccaacatgaagaaacaatttacaacctgcttaaggattgtccagctgttgctaaacatgacttctttaagtttagaatagacggtgacatggtaccacatatatcacgtcaacgtcttactaaatacacaatggcagacctcgtctatgctttaaggcattttgatgaaggtaattgtgacacattaaaagaaatacttgtcacatacaattgttgtgatgatgactacttcaataaaaaggactggtatgattttgtagaaaacccagatatattacgcgtatacgccaacttaggtgaacgtgtacgccaagctttgttaaaaacagtacagttctgtgatgccatgcgaaatgctggtattgttggtgtactgacattagataatcaagatctcaatggtaactggtatgactttggtgatttcatacaaaccacgccaggtagtggagttcctgttgtagactcttattattcattgctcatgcctatattaaccttgaccagggctttaactgcagagtcacatgttgacactgacttaacaaagccttacattaagtgggatttgttaaaatacgacttcacggaagagaggttaaaactctttgaccgttattttaaatactgggatcagacataccacccaaattgtgttaactgtttggatgacagatgcattctgcattgtgcaaactttaatgttctgttctctacagtgttcccacctacaagttttggaccactagtgagaaaaatatttgttgatggtgttccatttgtagtttcaactggataccacttcagagagctaggtgttgtacataatcaggatgtaaacttacatagctctagacttagttttaaggaattacttgtgtatgctgctgatcctgctatgcatgctgcttctggtaatctattactagataaacgcactacgtgcttttcagtagctgcacttactaacaatgttgcttttcaaactgtcaaacccggtaattttaacaaggacttctatgactttgctgtgtctaagggtttctttaaggaaggaagttctgttgaattaaaacacttcttctttgctcaggatggtaatgctgctatcagcgattatgactactatcgttataatctaccaacaatgtgtgatatcagacaactactatttgtagttgaagttgttgataagtactttgattgttacgatggtggctgtattaatgctaaccaagtcatcgtcaacaacctagacaaatcagctggttttccatttaataaatggggtaaggctagactttattatgattccatgagttatgaggatcaagatgcacttttcgcatatacaaaacgtaatgtcatccctactataactcaaatgaaccttaagtatgccattagtgcaaagaatagagctcgcaccgtagctggtgtctctatctgtagtactatgaccaatagacagtttcatcaaaaattactcaagtcaatagccgccactagaggagctactgtagtaattggaacaagcaaattctatggtggttggcacaacatgctcaaaactgtttatagtgatgtagaaaaccctcaccttatgggttgggattatcctaaatgtgatagagccatgcctaacatgcttagaattatggcctcacttgttcttgctcgcaaacatacaacgtgttgtagcttgtcacaccgtttctatagattagctaatgagtgtgctcaagtattgagtgaaatggtcatgtgtggcggttcactatatgttaaaccaggtggaacctcatcaggagatgccacaactgcttatgctaatagtgtgtttaacatttgtcaagctgtcacggccaatgttaatgcacttttatctactgatggtaacaaaattgccgataagtatgtccgcaatttacaacacagactttatgagtgtctctatagaaatagagatgttgacacagactttgtgaatgagttttacgcatatttgcgtaaacatttctcaatgatgatactctctgacgatgctgttgtgtgtttcaatagcacttatgcatctcaaggtctagtggctagcataaagaactttaagtcagttctttactatcaaaacaacgtttttatgtctgaagcaaaatgttggactgagactgaccttactaaaggacctcatgaattttgctctcaacatacaatgctagttaaacagggtgatgattatgtgtaccttccttacccagatccatcaagaatcctaggtgccggttgttttgtagatgatatcgtaaaaacagatggtacacttatgattgaacggttcgtgtctttagctatagatgcttacccacttactaaacatcctaatcaggagtatgctgatgtctttcatttgtacttacaatacatacgtaagctacatgatgagttaacaggacacatgttagacatgtattctgttatgcttactaatgataacacttcaaggtattgggaacctgagttttatgaggctatgtacacaccgcatacagtcttacaagctgttggtgcttgtgttctttgcaattcacagacttcattaagatgtggtgcttgcatacgtagaccattcttatgttgtaaatgctgttacgaccatgtcatctcaacatcacataaattagtcttgtctgttaatccgtatgtttgcaatgctccaggttgtgatgtcacagatgtgactcaactttacttaggaggtatgagctattactgtaagtcacataaaccacccattagttttccattgtgtgctaatggacaagtttttggtctctacaagaatacatgtgttggtagcgataatgttactgactttaatgcaattgcaacatgtgactggacaaatgctggtgattacattttagctaacacctgtactgaaagactcaagctttttgcagcagaaacgctcaaagctactgaggagacatttaaactgtcttatggtattgctactgtacgtgaagtgctgtctgacagagaattacatctttcatgggaagttggtaaacctagaccaccacttaaccgaaattatgtctttactggttatcgtgtaactaaaaacagtaaagtgcaaatcggagagtacacctttgaaaaaggtgactatggtgatgctgttgtttaccgaggtacaacaacttacaaactcaacgttggtgattattttgtgctgacatcacatacagtaatgccattaagtgcacctacactagtgccacaagagcactatgttagaattactggcttatacccaacactcaatatctcagatgagttttctagcaatgttgcaaattatcaaaaggttggtatgcaaaagtattctacactccagggaccacctggtactggtaaaagtcattttgctattggtctagctctctactacccttctgctcgcatagtatatacagcttgctctcatgcagctgttgatgcactatgtgagaaggcattaaaatatttgcccatagacaaatgtagtagaattatacctgcacgtgctcgtgtagagtgttttgataaattcaaggtgaattcaacattagaacagtatgtcttttgtactgtaaatgcattgcctgagacgacagcagatatagttgtctttgatgaaatttcaatggccacaaattatgatttgagtgttgtcaatgccagattacgtgctaagcactatgtgtacattggtgatcctgctcaattacctgcaccacgcacattactaactaagggtacactagaaccagaatatttcaattcagtgtgtagacttatgaaaactataggtccagacatgttcctcggaacttgtcgtagatgtcctgctgaaattgttgacactgtgagtgctttggtttatgataataagcttaaggcacataaagacaaatcagctcaatgctttaaaatgttctacaagggtgttatcacgcatgatgtttcatctgcaattaacaggccacaaataggcgtggtaagagaattccttacacgtaaccctgcttggagaaaagctgtctttatttcaccttacaattcccagaatgctgtagcctcaaagattttgggactaccaactcaaactgttgattcatcacagggctcagaatatgactatgtcatattcactcaaaccactgaaacagctcactcttgtaatgtaaacagattcaacgttgctattaccagagcaaaagtaggcatactttgcataatgtctgatagagacctttatgacaagttgcaatttacaagtcttgaaattccacgtaggaatgtggcaactttacaagctgaaaatgtaacaggactctttaaagattgtagtaaggtaatcactgggttacatcctacacaggcacctacacacttaagtgttgatactaaattcaaaactgaaggtttatgtgttgacatacctggcatacctaaggacatgacctatagaagattaatctctatgatgggtttcaaaatgaattaccaggttaatggttaccctaacatgtttatcacccgcgaagaagctataagacatgtacgtgcatggattggcttcgatgtcgaaggttgtcatgctactagagaagctgttggtaccaatttacctttacagctaggtttttctacaggtgttaacctagttgctgtacctacaggttatgttgatacacctaataatacagatttttccagagttagtgctaaaccaccgcctggagatcaatttaaacacctcataccacttatgtacaaaggacttccttggaatgtagtgcgtataaagattgtccaaatgttaagtgacacacttaaaaatctctctgacagagtcgtatttgtcttatgggcacatggctttgagttgacatctatgaagtattttgtgaagatcggacctgagcgcacatgttgtctatgtgatagacgtgctacatgcttttccactgcttcagacacttatgcctgttggcatcattctattggatttgattacgtctataatccgtttatgattgatgttcaacaatggggttttacaggtaacctacaaagcaaccatgatctgtattgtcaagtccatggtaatgcacatgtagctagttgtgatgcaatcatgactaggtgtctagctgtccacgagtgctttgttaagcgtgttgactggactattgaatatcctataatcggtgatgaactgaagattaatgcggcttgtagaaaggttcaacacatggttgttaaagctgcattattagcagacaaattcccagttcttcacgacattggtaaccctaaagctattaagtgtgtacctcaagctgatgtagaatggaagttctatgatgcacagccttgtagtgacaaagcttacaaaatagaagaactgttctattcttatgccacacattctgacaaattcacagatggtgtatgcctattttggaattgcaatgtcgatagatatcctgctaattccattgtttgtagatttgacactagagtgctatctaaccttaacttgcctggttgtgatggtggcagtttgtatgtaaataagcatgcattccacacaccagcttttgataaaagtgcttttgttaatctaaagcaacttccatttttctattactctgacagtccatgtgagtctcatggaaaacaagtagtgtcagatatagattatgtaccactaaagtctgctacgtgtataacacgttgcaatttaggtggtgctgtctgtagacatcatgctaatgagtacagattgtatctcgatgcttataacatgatgatctcagctggctttagcttgtgggtttacaaacaatttgatacctataacctctggaacacttttacaagacttcagagtttagaaaatgtggcttttaatgttgtaaataagggacactttgatggacaacagggtgaagtaccagtttctatcattaacaacactgtttacacaaaagttgatggtgttgatgtagaattgtttgagaacaaaaccacattacctgttaatgtagcatttgagctttgggctaagcgcaacattaaaccagtaccagaggtgaaaatactcaataatttgggtgtggacattgctgctaatactgtgatctgggactacaaaagagatgctccagcacatatatctactattggtgtttgttctatgactgacatagccaagaaaccaactgaaacgatttgtgcaccactcactgtcttttttgatggtagagttgatggtcaagtagacttatttagaaatgcccgtaatggtgttcttattacagaaggtagtgttaaaggtttacaaccatctgtaggtcccaaacaagctagtcttaatggagtcacattaattggagaagccgtaaaaacacagttcaattattacaagaaagtggatggtgttgtccaacaattacctgaaacttactttactcagagtagaaacttacaggaatttaagcccaggagtcaaatggaaattgatttcttagaacttgctatggatgaattcattgaacggtataaattagaaggctatgccttcgaacatatcgtttatggagattttagtcatagtcagttaggtggtttacatctactgattggactagctaaacgttttaaggaatcaccttttgaacttgaagattttattcctatggacagtacagttaaaaactacttcataacagatgcgcaaacaggttcatctaagtgtgtgtgttctgttattgatcttttacttgatgacttcgttgaaataataaagtcccaagatttatctgtagtttctaaggttgtcaaagtgactattgactatacagaaatctcatttatgctttggtgtaaagatggccatgtagaaacattttacccaaaattacaatctagtcaagcgtggcaaccgggtgttgctatgcctaatctttacaaaatgcaaagaatgctattagaaaagtgtgaccttcaaaattatggtgatagtgcaacattacctaaaggcataatgatgaatgtcgcaaaatatactcaactgtgtcaatatttaaacacactgacattagctgtaccctataatatgagagttatccattttggtgctggttctgataaaggagttgcaccaggtacagctgttttaagacaatggttgcctacaggtacgctgcttgtcgattcagatcttaatgactttgtctctgatgcagattcaactttgattggtgattgtgcaactgtacatacagctaataaatgggatctcattattagtgatatgtacgaccctaagactaagaatgtcacaaaagaaaacgactctaaagagggttttttcacttacatttgtgggtttatacaacaaaagctagctcttggaggttccgtggctataaagataacagaacattcttggaatgctgatctttataagctcatgggacacttcgcatggtggacagcctttgttactaatgtgaatgcgtcatcatctgaagcatttttaatcggatgtaactaccttggcaaaccacgcgaacaaatagatggttatgtcatgcatgcaaattacatattttggaggaatacaaatccaattcagctttcttcttattctttattcgacatgagtaaattcccccttaaattaaggggtactgctgttatgtctttaaaagaaggtcaaatcaatgatatgattctctctcttcttagtaaaggtagacttataattagagaaaacaacagagttgttatttctagtgatgttcttgttaacaactaa

SEQ ID NO: 60 - DNA, 29867 bp, Viruses
  SARS-CoV-2 genome
attaaaggtttataccttcccaggtaacaaaccaaccaactttcgatctcttgtagatctgttctctaaacgaactttaaaatctgtgtggctgtcactcggctgcatgcttagtgcactcacgcagtataattaataactaattactgtcgttgacaggacacgagtaactcgtctatcttctgcaggctgcttacggtttcgtccgtgttgcagccgatcatcagcacatctaggtttcgtccgggtgtgaccgaaaggtaagatggagagccttgtccctggtttcaacgagaaaacacacgtccaactcagtttgcctgttttacaggttcgcgacgtgctcgtacgtggctttggagactccgtggaggaggtcttatcagaggcacgtcaacatcttaaagatggcacttgtggcttagtagaagttgaaaaaggcgttttgcctcaacttgaacagccctatgtgttcatcaaacgttcggatgctcgaactgcacctcatggtcatgttatggttgagctggtagcagaactcgaaggcattcagtacggtcgtagtggtgagacacttggtgtccttgtccctcatgtgggcgaaataccagtggcttaccgcaaggttcttcttcgtaagaacggtaataaaggagctggtggccatagttacggcgccgatctaaagtcatttgacttaggcgacgagcttggcactgatccttatgaagattttcaagaaaactggaacactaaacatagcagtggtgttacccgtgaactcatgcgtgagcttaacggaggggcatacactcgctatgtcgataacaacttctgtggccctgatggctaccctcttgagtgcattaaagaccttctagcacgtgctggtaaagcttcatgcactttgtccgaacaactggactttattgacactaagaggggtgtatactgctgccgtgaacatgagcatgaaattgcttggtacacggaacgttctgaaaagagctatgaattgcagacaccttttgaaattaaattggcaaagaaatttgacaccttcaatggggaatgtccaaattttgtatttcccttaaattccataatcaagactattcaaccaagggttgaaaagaaaaagcttgatggctttatgggtagaattcgatctgtctatccagttgcgtcaccaaatgaatgcaaccaaatgtgcctttcaactctcatgaagtgtgatcattgtggtgaaacttcatggcagacgggcgattttgttaaagccacttgcgaattttgtggcactgagaatttgactaaagaaggtgccactacttgtggttacttaccccaaaatgctgttgttaaaatttattgtccagcatgtcacaattcagaagtaggacctgagcatagtcttgccgaataccataatgaatctggcttgaaaaccattcttcgtaagggtggtcgcactattgcctttggaggctgtgtgttctcttatgttggttgccataacaagtgtgcctattgggttccacgtgctagcgctaacataggttgtaaccatacaggtgttgttggagaaggttccgaaggtcttaatgacaaccttcttgaaatactccaaaaagagaaagtcaacatcaatattgttggtgactttaaacttaatgaagagatcgccattattttggcatctttttctgcttccacaagtgcttttgtggaaactgtgaaaggtttggattataaagcattcaaacaaattgttgaatcctgtggtaattttaaagttacaaaaggaaaagctaaaaaaggtgcctggaatattggtgaacagaaatcaatactgagtcctctttatgcatttgcatcagaggctgctcgtgttgtacgatcaattttctcccgcactcttgaaactgctcaaaattctgtgcgtgttttacagaaggccgctataacaatactagatggaatttcacagtattcactgagactcattgatgctatgatgttcacatctgatttggctactaacaatctagttgtaatggcctacattacaggtggtgttgttcagttgacttcgcagtggctaactaacatctttggcactgtttatgaaaaactcaaacccgtccttgattggcttgaagagaagtttaaggaaggtgtagagtttcttagagacggttgggaaattgttaaatttatctcaacctgtgcttgtgaaattgtcggtggacaaattgtcacctgtgctaaggaaattaaggagagtgttcagacattctttaagcttgtaaataaatttttggctttgtgtgctgactctatcattattggtggagctaaacttaaagccttgaatttaggtgaaacatttgtcacgcactcaaagggattgtacagaaagtgtgttaaatccagagaagaaactggcctactcatgcctctaaaagccccaaaagaaattatcttcttagagggagaaacacttcccacagaagtgttaacagaggaagttgtcttgaaaactggtgatttacaaccattagaacaacctactagtgaagctgttgaagctccattggttggtacaccagtttgtattaacgggcttatgttgctcgaaatcaaagacacagaaaagtactgtgcccttgcacctaatatgatggtaacaaacaataccttcacactcaaaggcggtgcaccaacaaaggttacttttggtgatgacactgtgatagaagtgcaaggttacaagagtgtgaatatcacttttgaacttgatgaaaggattgataaagtacttaatgagaagtgctctgcctatacagttgaactcggtacagaagtaaatgagttcgcctgtgttgtggcagatgctgtcataaaaactttgcaaccagtatctgaattacttacaccactgggcattgatttagatgagtggagtatggctacatactacttatttgatgagtctggtgagtttaaattggcttcacatatgtattgttctttctaccctccagatgaggatgaagaagaaggtgattgtgaagaagaagagtttgagccatcaactcaatatgagtatggtactgaagatgattaccaaggtaaacctttggaatttggtgccacttctgctgctcttcaacctgaagaagagcaagaagaagattggttagatgatgatagtcaacaaactgttggtcaacaagacggcagtgaggacaatcagacaactactattcaaacaattgttgaggttcaacctcaattagagatggaacttacaccagttgttcagactattgaagtgaatagttttagtggttatttaaaacttactgacaatgtatacattaaaaatgcagacattgtggaagaagctaaaaaggtaaaaccaacagtggttgttaatgcagccaatgtttaccttaaacatggaggaggtgttgcaggagccttaaataaggctactaacaatgccatgcaagttgaatctgatgattacatagctactaatggaccacttaaagtgggtggtagttgtgttttaagcggacacaatcttgctaaacactgtcttcatgttgtcggcccaaatgttaacaaaggtgaagacattcaacttcttaagagtgcttatgaaaattttaatcagcacgaagttctacttgcaccattattatcagctggtatttttggtgctgaccctatacattctttaagagtttgtgtagatactgttcgcacaaatgtctacttagctgtctttgataaaaatctctatgacaaacttgtttcaagctttttggaaatgaagagtgaaaagcaagttgaacaaaagatcgctgagattcctaaagaggaagttaagccatttataactgaaagtaaaccttcagttgaacagagaaaacaagatgataagaaaatcaaagcttgtgttgaagaagttacaacaactctggaagaaactaagttcctcacagaaaacttgttactttatattgacattaatggcaatcttcatccagattctgccactcttgttagtgacattgacatcactttcttaaagaaagatgctccatatatagtgggtgatgttgttcaagagggtgttttaactgctgtggttatacctactaaaaaggctggtggcactactgaaatgctagcgaaagctttgagaaaagtgccaacagacaattatataaccacttacccgggtcagggtttaaatggttacactgtagaggaggcaaagacagtgcttaaaaagtgtaaaagtgccttttacattctaccatctattatctctaatgagaagcaagaaattcttggaactgtttcttggaatttgcgagaaatgcttgcacatgcagaagaaacacgcaaattaatgcctgtctgtgtggaaactaaagccatagtttcaactatacagcgtaaatataagggtattaaaatacaagagggtgtggttgattatggtgctagattttacttttacaccagtaaaacaactgtagcgtcacttatcaacacacttaacgatctaaatgaaactcttgttacaatgccacttggctatgtaacacatggcttaaatttggaagaagctgctcggtatatgagatctctcaaagtgccagctacagtttctgtttcttcacctgatgctgttacagcgtataatggttatcttacttcttcttctaaaacacctgaagaacattttattgaaaccatctcacttgctggttcctataaagattggtcctattctggacaatctacacaactaggtatagaatttcttaagagaggtgataaaagtgtatattacactagtaatcctaccacattccacctagatggtgaagttatcacctttgacaatcttaagacacttctttctttgagagaagtgaggactattaaggtgtttacaacagtagacaacattaacctccacacgcaagttgtggacatgtcaatgacatatggacaacagtttggtccaacttatttggatggagctgatgttactaaaataaaacctcataattcacatgaaggtaaaacattttatgttttacctaatgatgacactctacgtgttgaggcttttgagtactaccacacaactgatcctagttttctgggtaggtacatgtcagcattaaatcacactaaaaagtggaaatacccacaagttaatggtttaacttctattaaatgggcagataacaactgttatcttgccactgcattgttaacactccaacaaatagagttgaagtttaatccacctgctctacaagatgcttattacagagcaagggctggtgaagctgctaacttttgtgcacttatcttagcctactgtaataagacagtaggtgagttaggtgatgttagagaaacaatgagttacttgtttcaacatgccaatttagattcttgcaaaagagtcttgaacgtggtgtgtaaaacttgtggacaacagcagacaacccttaagggtgtagaagctgttatgtacatgggcacactttcttatgaacaatttaagaaaggtgttcagataccttgtacgtgtggtaaacaagctacaaaatatctagtacaacaggagtcaccttttgttatgatgtcagcaccacctgctcagtatgaacttaagcatggtacatttacttgtgctagtgagtacactggtaattaccagtgtggtcactataaacatataacttctaaagaaactttgtattgcatagacggtgctttacttacaaagtcctcagaatacaaaggtcctattacggatgttttctacaaagaaaacagttacacaacaaccataaaaccagttacttataaattggatggtgttgtttgtacagaaattgaccctaagttggacaattattataagaaagacaattcttatttcacagagcaaccaattgatcttgtaccaaaccaaccatatccaaacgcaagcttcgataattttaagtttgtatgtgataatatcaaatttgctgatgatttaaaccagttaactggttataagaaacctgcttcaagagagcttaaagttacatttttccctgacttaaatggtgatgtggtggctattgattataaacactacacaccctcttttaagaaaggagctaaattgttacataaacctattgtttggcatgttaacaatgcaactaataaagccacgtataaaccaaatacctggtgtatacgttgtctttggagcacaaaaccagttgaaacatcaaattcgtttgatgtactgaagtcagaggacgcgcagggaatggataatcttgcctgcgaagatctaaaaccagtctctgaagaagtagtggaaaatcctaccatacagaaagacgttcttgagtgtaatgtgaaaactaccgaagttgtaggagacattatacttaaaccagcaaataatagtttaaaaattacagaagaggttggccacacagatctaatggctgcttatgtagacaattctagtcttactattaagaaacctaatgaattatctagagtattaggtttgaaaacccttgctactcatggtttagctgctgttaatagtgtcccttgggatactatagctaattatgctaagccttttcttaacaaagttgttagtacaactactaacatagttacacggtgtttaaaccgtgtttgtactaattatatgccttatttctttactttattgctacaattgtgtacttttactagaagtacaaattctagaattaaagcatctatgccgactactatagcaaagaatactgttaagagtgtcggtaaattttgtctagaggcttcatttaattatttgaagtcacctaatttttctaaactgataaatattataatttggtttttactattaagtgtttgcctaggttctttaatctactcaaccgctgctttaggtgttttaatgtctaatttaggcatgccttcttactgtactggttacagagaaggctatttgaactctactaatgtcactattgcaacctactgtactggttctataccttgtagtgtttgtcttagtggtttagattctttagacacctatccttctttagaaactatacaaattaccatttcatcttttaaatgggatttaactgcttttggcttagttgcagagtggtttttggcatatattcttttcactaggtttttctatgtacttggattggctgcaatcatgcaattgtttttcagctattttgcagtacattttattagtaattcttggcttatgtggttaataattaatcttgtacaaatggccccgatttcagctatggttagaatgtacatcttctttgcatcattttattatgtatggaaaagttatgtgcatgttgtagacggttgtaattcatcaacttgtatgatgtgttacaaacgtaatagagcaacaagagtcgaatgtacaactattgttaatggtgttagaaggtccttttatgtctatgctaatggaggtaaaggcttttgcaaactacacaattggaattgtgttaattgtgatacattctgtgctggtagtacatttattagtgatgaagttgcgagagacttgtcactacagtttaaaagaccaataaatcctactgaccagtcttcttacatcgttgatagtgttacagtgaagaatggttccatccatctttactttgataaagctggtcaaaagacttatgaaagacattctctctctcattttgttaacttagacaacctgagagctaataacactaaaggttcattgcctattaatgttatagtttttgatggtaaatcaaaatgtgaagaatcatctgcaaaatcagcgtctgtttactacagtcagcttatgtgtcaacctatactgttactagatcaggcattagtgtctgatgttggtgatagtgcggaagttgcagttaaaatgtttgatgcttacgttaatacgttttcatcaacttttaacgtaccaatggaaaaactcaaaacactagttgcaactgcagaagctgaacttgcaaagaatgtgtccttagacaatgtcttatctacttttatttcagcagctcggcaagggtttgttgattcagatgtagaaactaaagatgttgttgaatgtcttaaattgtcacatcaatctgacatagaagttactggcgatagttgtaataactatatgctcacctataacaaagttgaaaacatgacaccccgtgaccttggtgcttgtattgactgtagtgcgcgtcatattaatgcgcaggtagcaaaaagtcacaacattgctttgatatggaacgttaaagatttcatgtcattgtctgaacaactacgaaaacaaatacgtagtgctgctaaaaagaataacttaccttttaagttgacatgtgcaactactagacaagttgttaatgttgtaacaacaaagatagcacttaagggtggtaaaattgttaataattggttgaagcagttaattaaagttacacttgtgttcctttttgttgctgctattttctatttaataacacctgttcatgtcatgtctaaacatactgacttttcaagtgaaatcataggatacaaggctattgatggtggtgtcactcgtgacatagcatctacagatacttgttttgctaacaaacatgctgattttgacacatggtttagccagcgtggtggtagttatactaatgacaaagcttgcccattgattgctgcagtcataacaagagaagtgggttttgtcgtgcctggtttgcctggcacgatattacgcacaactaatggtgactttttgcatttcttacctagagtttttagtgcagttggtaacatctgttacacaccatcaaaacttatagagtacactgactttgcaacatcagcttgtgttttggctgctgaatgtacaatttttaaagatgcttctggtaagccagtaccatattgttatgataccaatgtactagaaggttctgttgcttatgaaagtttacgccctgacacacgttatgtgctcatggatggctctattattcaatttcctaacacctaccttgaaggttctgttagagtggtaacaacttttgattctgagtactgtaggcacggcacttgtgaaagatcagaagctggtgtttgtgtatctactagtggtagatgggtacttaacaatgattattacagatctttaccaggagttttctgtggtgtagatgctgtaaatttacttactaatatgtttacaccactaattcaacctattggtgctttggacatatcagcatctatagtagctggtggtattgtagctatcgtagtaacatgccttgcctactattttatgaggtttagaagagcttttggtgaatacagtcatgtagttgcctttaatactttactattccttatgtcattcactgtactctgtttaacaccagtttactcattcttacctggtgtttattctgttatttacttgtacttgacattttatcttactaatgatgtttcttttttagcacatattcagtggatggttatgttcacacctttagtacctttctggataacaattgcttatatcatttgtatttccacaaagcatttctattggttctttagtaattacctaaagagacgtgtagtctttaatggtgtttcctttagtacttttgaagaagctgcgctgtgcacctttttgttaaataaagaaatgtatctaaagttgcgtagtgatgtgctattacctcttacgcaatataatagatacttagctctttataataagtacaagtattttagtggagcaatggatacaactagctacagagaagctgcttgttgtcatctcgcaaaggctctcaatgacttcagtaactcaggttctgatgttctttaccaaccaccacaaacctctatcacctcagctgttttgcagagtggttttagaaaaatggcattcccatctggtaaagttgagggttgtatggtacaagtaacttgtggtacaactacacttaacggtctttggcttgatgacgtagtttactgtccaagacatgtgatctgcacctctgaagacatgcttaaccctaattatgaagatttactcattcgtaagtctaatcataatttcttggtacaggctggtaatgttcaactcagggttattggacattctatgcaaaattgtgtacttaagcttaaggttgatacagccaatcctaagacacctaagtataagtttgttcgcattcaaccaggacagactttttcagtgttagcttgttacaatggttcaccatctggtgtttaccaatgtgctatgaggcccaatttcactattaagggttcattccttaatggttcatgtggtagtgttggttttaacatagattatgactgtgtctctttttgttacatgcaccatatggaattaccaactggagttcatgctggcacagacttagaaggtaacttttatggaccttttgttgacaggcaaacagcacaagcagctggtacggacacaactattacagttaatgttttagcttggttgtacgctgctgttataaatggagacaggtggtttctcaatcgatttaccacaactcttaatgactttaaccttgtggctatgaagtacaattatgaacctctaacacaagaccatgttgacatactaggacctctttctgctcaaactggaattgccgttttagatatgtgtgcttcattaaaagaattactgcaaaatggtatgaatggacgtaccatattgggtagtgctttattagaagatgaatttacaccttttgatgttgttagacaatgctcaggtgttactttccaaagtgcagtgaaaagaacaatcaagggtacacaccactggttgttactcacaattttgacttcacttttagttttagtccagagtactcaatggtctttgttcttttttttgtatgaaaatgcctttttaccttttgctatgggtattattgctatgtctgcttttgcaatgatgtttgtcaaacataagcatgcatttctctgtttgtttttgttaccttctcttgccactgtagcttattttaatatggtctatatgcctgctagttgggtgatgcgtattatgacatggttggatatggttgatactagtttgtctggttttaagctaaaagactgtgttatgtatgcatcagctgtagtgttactaatccttatgacagcaagaactgtgtatgatgatggtgctaggagagtgtggacacttatgaatgtcttgacactcgtttataaagtttattatggtaatgctttagatcaagccatttccatgtgggctcttataatctctgttacttctaactactcaggtgtagttacaactgtcatgtttttggccagaggtattgtttttatgtgtgttgagtattgccctattttcttcataactggtaatacacttcagtgtataatgctagtttattgtttcttaggctatttttgtacttgttactttggcctcttttgtttactcaaccgctactttagactgactcttggtgtttatgattacttagtttctacacaggagtttagatatatgaattcacagggactactcccacccaagaatagcatagatgccttcaaactcaacattaaattgttgggtgttggtggcaaaccttgtatcaaagtagccactgtacagtctaaaatgtcagatgtaaagtgcacatcagtagtcttactctcagttttgcaacaactcagagtagaatcatcatctaaattgtgggctcaatgtgtccagttacacaatgacattctcttagctaaagatactactgaagcctttgaaaaaatggtttcactactttctgttttgctttccatgcagggtgctgtagacataaacaagctttgtgaagaaatgctggacaacagggcaaccttacaagctatagcctcagagtttagttcccttccatcatatgcagcttttgctactgctcaagaagcttatgagcaggctgttgctaatggtgattctgaagttgttcttaaaaagttgaagaagtctttgaatgtggctaaatctgaatttgaccgtgatgcagccatgcaacgtaagttggaaaagatggctgatcaagctatgacccaaatgtataaacaggctagatctgaggacaagagggcaaaagttactagtgctatgcagacaatgcttttcactatgcttagaaagttggataatgatgcactcaacaacattatcaacaatgcaagagatggttgtgttcccttgaacataatacctcttacaacagcagccaaactaatggttgtcataccagactataacacatataaaaatacgtgtgatggtacaacatttacttatgcatcagcattgtgggaaatccaacaggttgtagatgcagatagtaaaattgttcaacttagtgaaattagtatggacaattcacctaatttagcatggcctcttattgtaacagctttaagggccaattctgctgtcaaattacagaataatgagcttagtcctgttgcactacgacagatgtcttgtgctgccggtactacacaaactgcttgcactgatgacaatgcgttagcttactacaacacaacaaagggaggtaggtttgtacttgcactgttatccgatttacaggatttgaaatgggctagattccctaagagtgatggaactggtactatctatacagaactggaaccaccttgtaggtttgttacagacacacctaaaggtcctaaagtgaagtatttatactttattaaaggattaaacaacctaaatagaggtatggtacttggtagtttagctgccacagtacgtctacaagctggtaatgcaacagaagtgcctgccaattcaactgtattatctttctgtgcttttgctgtagatgctgctaaagcttacaaagattatctagctagtgggggacaaccaatcactaattgtgttaagatgttgtgtacacacactggtactggtcaggcaataacagttacaccggaagccaatatggatcaagaatcctttggtggtgcatcgtgttgtctgtactgccgttgccacatagatcatccaaatcctaaaggattttgtgacttaaaaggtaagtatgtacaaatacctacaacttgtgctaatgaccctgtgggttttacacttaaaaacacagtctgtaccgtctgcggtatgtggaaaggttatggctgtagttgtgatcaactccgcgaacccatgcttcagtcagctgatgcacaatcgtttttaaacgggtttgcggtgtaagtgcagcccgtcttacaccgtgcggcacaggcactagtactgatgtcgtatacagggcttttgacatctacaatgataaagtagctggttttgctaaattcctaaaaactaattgttgtcgcttccaagaaaaggacgaagatgacaatttaattgattcttactttgtagttaagagacacactttctctaactaccaacatgaagaaacaatttataatttacttaaggattgtccagctgttgctaaacatgacttctttaagtttagaatagacggtgacatggtaccacatatatcacgtcaacgtcttactaaatacacaatggcagacctcgtctatgctttaaggcattttgatgaaggtaattgtgacacattaaaagaaatacttgtcacatacaattgttgtgatgatgattatttcaataaaaaggactggtatgattttgtagaaaacccagatatattacgcgtatacgccaacttaggtgaacgtgtacgccaagctttgttaaaaacagtacaattctgtgatgccatgcgaaatgctggtattgttggtgtactgacattagataatcaagatctcaatggtaactggtatgatttcggtgatttcatacaaaccacgccaggtagtggagttcctgttgtagattcttattattcattgttaatgcctatattaaccttgaccagggctttaactgcagagtcacatgttgacactgacttaacaaagccttacattaagtgggatttgttaaaatatgacttcacggaagagaggttaaaactctttgaccgttattttaaatattgggatcagacataccacccaaattgtgttaactgtttggatgacagatgcattctgcattgtgcaaactttaatgttttattctctacagtgttcccacctacaagttttggaccactagtgagaaaaatatttgttgatggtgttccatttgtagtttcaactggataccacttcagagagctaggtgttgtacataatcaggatgtaaacttacatagctctagacttagttttaaggaattacttgtgtatgctgctgaccctgctatgcacgctgcttctggtaatctattactagataaacgcactacgtgcttttcagtagctgcacttactaacaatgttgcttttcaaactgtcaaacccggtaattttaacaaagacttctatgactttgctgtgtctaagggtttctttaaggaaggaagttctgttgaattaaaacacttcttctttgctcaggatggtaatgctgctatcagcgattatgactactatcgttataatctaccaacaatgtgtgatatcagacaactactatttgtagttgaagttgttgataagtactttgattgttacgatggtggctgtattaatgctaaccaagtcatcgtcaacaacctagacaaatcagctggttttccatttaataaatggggtaaggctagactttattatgattcaatgagttatgaggatcaagatgcacttttcgcatatacaaaacgtaatgtcatccctactataactcaaatgaatcttaagtatgccattagtgcaaagaatagagctcgcaccgtagctggtgtctctatctgtagtactatgaccaatagacagtttcatcaaaaattattgaaatcaatagccgccactagaggagctactgtagtaattggaacaagcaaattctatggtggttggcacaacatgttaaaaactgtttatagtgatgtagaaaaccctcaccttatgggttgggattatcctaaatgtgatagagccatgcctaacatgcttagaattatggcctcacttgttcttgctcgcaaacatacaacgtgttgtagcttgtcacaccgtttctatagattagctaatgagtgtgctcaagtattgagtgaaatggtcatgtgtggcggttcactatatgttaaaccaggtggaacctcatcaggagatgccacaactgcttatgctaatagtgtttttaacatttgtcaagctgtcacggccaatgttaatgcacttttatctactgatggtaacaaaattgccgataagtatgtccgcaatttacaacacagactttatgagtgtctctatagaaatagagatgttgacacagactttgtgaatgagttttacgcatatttgcgtaaacatttctcaatgatgatactctctgacgatgctgttgtgtgtttcaatagcacttatgcatctcaaggtctagtggctagcataaagaactttaagtcagttctttattatcaaaacaatgtttttatgtctgaagcaaaatgttggactgagactgaccttactaaaggacctcatgaattttgctctcaacatacaatgctagttaaacagggtgatgattatgtgtaccttccttacccagatccatcaagaatcctaggggccggctgttttgtagatgatatcgtaaaaacagatggtacacttatgattgaacggttcgtgtctttagctatagatgcttacccacttactaaacatcctaatcaggagtatgctgatgtctttcatttgtacttacaatacataagaaagctacatgatgagttaacaggacacatgttagacatgtattctgttatgcttactaatgataacacttcaaggtattgggaacctgagttttatgaggctatgtacacaccgcatacagtcttacaggctgttggggcttgtgttctttgcaattcacagacttcattaagatgtggtgcttgcatacgtagaccattcttatgttgtaaatgctgttacgaccatgtcatatcaacatcacataaattagtcttgtctgttaatccgtatgtttgcaatgctccaggttgtgatgtcacagatgtgactcaactttacttaggaggtatgagctattattgtaaatcacataaaccacccattagttttccattgtgtgctaatggacaagtttttggtttatataaaaatacatgtgttggtagcgataatgttactgactttaatgcaattgcaacatgtgactggacaaatgctggtgattacattttagctaacacctgtactgaaagactcaagctttttgcagcagaaacgctcaaagctactgaggagacatttaaactgtcttatggtattgctactgtacgtgaagtgctgtctgacagagaattacatctttcatgggaagttggtaaacctagaccaccacttaaccgaaattatgtctttactggttatcgtgtaactaaaaacagtaaagtacaaataggagagtacacctttgaaaaaggtgactatggtgatgctgttgtttaccgaggtacaacaacttacaaattaaatgttggtgattattttgtgctgacatcacatacagtaatgccattaagtgcacctacactagtgccacaagagcactatgttagaattactggcttatacccaacactcaatatctcagatgagttttctagcaatgttgcaaattatcaaaaggttggtatgcaaaagtattctacactccagggaccacctggtactggtaagagtcattttgctattggcctagctctctactacccttctgctcgcatagtgtatacagcttgctctcatgccgctgttgatgcactatgtgagaaggcattaaaatatttgcctatagataaatgtagtagaattatacctgcacgtgctcgtgtagagtgttttgataaattcaaagtgaattcaacattagaacagtatgtcttttgtactgtaaatgcattgcctgagacgacagcagatatagttgtctttgatgaaatttcaatggccacaaattatgatttgagtgttgtcaatgccagattacgtgctaagcactatgtgtacattggcgaccctgctcaattacctgcaccacgcacattgctaactaagggcacactagaaccagaatatttcaattcagtgtgtagacttatgaaaactataggtccagacatgttcctcggaacttgtcggcgttgtcctgctgaaattgttgacactgtgagtgctttggtttatgataataagcttaaagcacataaagacaaatcagctcaatgctttaaaatgttttataagggtgttatcacgcatgatgtttcatctgcaattaacaggccacaaataggcgtggtaagagaattccttacacgtaaccctgcttggagaaaagctgtctttatttcaccttataattcacagaatgctgtagcctcaaagattttgggactaccaactcaaactgttgattcatcacagggctcagaatatgactatgtcatattcactcaaaccactgaaacagctcactcttgtaatgtaaacagatttaatgttgctattaccagagcaaaagtaggcatactttgcataatgtctgatagagacctttatgacaagttgcaatttacaagtcttgaaattccacgtaggaatgtggcaactttacaagctgaaaatgtaacaggactctttaaagattgtagtaaggtaatcactgggttacatcctacacaggcacctacacacctcagtgttgacactaaattcaaaactgaaggtttatgtgttgacatacctggcatacctaaggacatgacctatagaagactcatctctatgatgggttttaaaatgaattatcaagttaatggttaccctaacatgtttatcacccgcgaagaagctataagacatgtacgtgcatggattggcttcgatgtcgaggggtgtcatgctactagagaagctgttggtaccaatttacctttacagctaggtttttctacaggtgttaacctagttgctgtacctacaggttatgttgatacacctaataatacagatttttccagagttagtgctaaaccaccgcctggagatcaatttaaacacctcataccacttatgtacaaaggacttccttggaatgtagtgcgtataaagattgtacaaatgttaagtgacacacttaaaaatctctctgacagagtcgtatttgtcttatgggcacatggctttgagttgacatctatgaagtattttgtgaaaataggacctgagcgcacctgttgtctatgtgatagacgtgccacatgcttttccactgcttcagacacttatgcctgttggcatcattctattggatttgattacgtctataatccgtttatgattgatgttcaacaatggggttttacaggtaacctacaaagcaaccatgatctgtattgtcaagtccatggtaatgcacatgtagctagttgtgatgcaatcatgactaggtgtctagctgtccacgagtgctttgttaagcgtgttgactggactattgaatatcctataattggtgatgaactgaagattaatgcggcttgtagaaaggttcaacacatggttgttaaagctgcattattagcagacaaattcccagttcttcacgacattggtaaccctaaagctattaagtgtgtacctcaagctgatgtagaatggaagttctatgatgcacagccttgtagtgacaaagcttataaaatagaagaattattctattcttatgccacacattctgacaaattcacagatggtgtatgcctattttggaattgcaatgtcgatagatatcctgctaattccattgtttgtagatttgacactagagtgctatctaaccttaacttgcctggttgtgatggtggcagtttgtatgtaaataaacatgcattccacacaccagcttttgataaaagtgcttttgttaatttaaaacaattaccatttttctattactctgacagtccatgtgagtctcatggaaaacaagtagtgtcagatatagattatgtaccactaaagtctgctacgtgtataacacgttgcaatttaggtggtgctgtctgtagacatcatgctaatgagtacagattgtatctcgatgcttataacatgatgatctcagctggctttagcttgtgggtttacaaacaatttgatacttataacctctggaacacttttacaagacttcagagtttagaaaatgtggcttttaatgttgtaaataagggacactttgatggacaacagggtgaagtaccagtttctatcattaataacactgtttacacaaaagttgatggtgttgatgtagaattgtttgaaaataaaacaacattacctgttaatgtagcatttgagctttgggctaagcgcaacattaaaccagtaccagaggtgaaaatactcaataatttgggtgtggacattgctgctaatactgtgatctgggactacaaaagagatgctccagcacatatatctactattggtgtttgttctatgactgacatagccaagaaaccaactgaaacgatttgtgcaccactcactgtcttttttgatggtagagttgatggtcaagtagacttatttagaaatgcccgtaatggtgttcttattacagaaggtagtgttaaaggtttacaaccatctgtaggtcccaaacaagctagtcttaatggagtcacattaattggagaagccgtaaaaacacagttcaattattataagaaagttgatggtgttgtccaacaattacctgaaacttactttactcagagtagaaatttacaagaatttaaacccaggagtcaaatggaaattgatttcttagaattagctatggatgaattcattgaacggtataaattagaaggctatgccttcgaacatatcgtttatggagattttagtcatagtcagttaggtggtttacatctactgattggactagctaaacgttttaaggaatcaccttttgaattagaagattttattcctatggacagtacagttaaaaactatttcataacagatgcgcaaacaggttcatctaagtgtgtgtgttctgttattgatttattacttgatgattttgttgaaataataaaatcccaagatttatctgtagtttctaaggttgtcaaagtgactattgactatacagaaatttcatttatgctttggtgtaaagatggccatgtagaaacattttacccaaaattacaatctagtcaagcgtggcaaccgggtgttgctatgcctaatctttacaaaatgcaaagaatgctattagaaaagtgtgaccttcaaaattatggtgatagtgcaacattacctaaaggcataatgatgaatgtcgcaaaatatactcaactgtgtcaatatttaaacacattaacattagctgtaccctataatatgagagttatacattttggtgctggttctgataaaggagttgcaccaggtacagctgttttaagacagtggttgcctacgggtacgctgcttgtcgattcagatcttaatgactttgtctctgatgcagattcaactttgattggtgattgtgcaactgtacatacagctaataaatgggatctcattattagtgatatgtacgaccctaagactaaaaatgttacaaaagaaaatgactctaaagagggttttttcacttacatttgtgggtttatacaacaaaagctagctcttggaggttccgtggctataaagataacagaacattcttggaatgctgatctttataagctcatgggacacttcgcatggtggacagcctttgttactaatgtgaatgcgtcatcatctgaagcatttttaattggatgtaattatcttggcaaaccacgcgaacaaatagatggttatgtcatgcatgcaaattacatattttggaggaatacaaatccaattcagttgtcttcctattctttatttgacatgagtaaatttccccttaaattaaggggtactgctgttatgtctttaaaagaaggtcaaatcaatgatatgattttatctcttcttagtaaaggtagacttataattagagaaaacaacagagttgttatttctagtgatgttcttgttaacaactaaacgaacaatgtttgtttttcttgttttattgccactagtctctagtcagtgtgttaatcttacaaccagaactcaattaccccctgcatacactaattctttcacacgtggtgtttattaccctgacaaagttttcagatcctcagttttacattcaactcaggacttgttcttacctttcttttccaatgttacttggttccatgctatacatgtctctgggaccaatggtactaagaggtttgataaccctgtcctaccatttaatgatggtgtttattttgcttccactgagaagtctaacataataagaggctggatttttggtactactttagattcgaagacccagtccctacttattgttaataacgctactaatgttgttattaaagtctgtgaatttcaattttgtaatgatccatttttgggtgtttattaccacaaaaacaacaaaagttggatggaaagtgagttcagagtttattctagtgcgaataattgcacttttgaatatgtctctcagccttttcttatggaccttgaaggaaaacagggtaatttcaaaaatcttagggaatttgtgtttaagaatattgatggttattttaaaatatattctaagcacacgcctattaatttagtgcgtgatctccctcagggtttttcggctttagaaccattggtagatttgccaataggtattaacatcactaggtttcaaactttacttgctttacatagaagttatttgactcctggtgattcttcttcaggttggacagctggtgctgcagcttattatgtgggttatcttcaacctaggacttttctattaaaatataatgaaaatggaaccattacagatgctgtagactgtgcacttgaccctctctcagaaacaaagtgtacgttgaaatccttcactgtagaaaaaggaatctatcaaacttctaactttagagtccaaccaacagaatctattgttagatttcctaatattacaaacttgtgcccttttggtgaagtttttaacgccaccagatttgcatctgtttatgcttggaacaggaagagaatcagcaactgtgttgctgattattctgtcctatataattccgcatcattttccacttttaagtgttatggagtgtctcctactaaattaaatgatctctgctttactaatgtctatgcagattcatttgtaattagaggtgatgaagtcagacaaatcgctccagggcaaactggaaagattgctgattataattataaattaccagatgattttacaggctgcgttatagcttggaattctaacaatcttgattctaaggttggtggtaattataattacctgtatagattgtttaggaagtctaatctcaaaccttttgagagagatatttcaactgaaatctatcaggccggtagcacaccttgtaatggtgttgaaggttttaattgttactttcctttacaatcatatggtttccaacccactaatggtgttggttaccaaccatacagagtagtagtactttcttttgaacttctacatgcaccagcaactgtttgtggacctaaaaagtctactaatttggttaaaaacaaatgtgtcaatttcaacttcaatggtttaacaggcacaggtgttcttactgagtctaacaaaaagtttctgcctttccaacaatttggcagagacattgctgacactactgatgctgtccgtgatccacagacacttgagattcttgacattacaccatgttcttttggtggtgtcagtgttataacaccaggaacaaatacttctaaccaggttgctgttctttatcaggatgttaactgcacagaagtccctgttgctattcatgcagatcaacttactcctacttggcgtgtttattctacaggttctaatgtttttcaaacacgtgcaggctgtttaataggggctgaacatgtcaacaactcatatgagtgtgacatacccattggtgcaggtatatgcgctagttatcagactcagactaattctcctcggcgggcacgtagtgtagctagtcaatccatcattgcctacactatgtcacttggtgcagaaaattcagttgcttactctaataactctattgccatacccacaaattttactattagtgttaccacagaaattctaccagtgtctatgaccaagacatcagtagattgtacaatgtacatttgtggtgattcaactgaatgcagcaatcttttgttgcaatatggcagtttttgtacacaattaaaccgtgctttaactggaatagctgttgaacaagacaaaaacacccaagaagtttttgcacaagtcaaacaaatttacaaaacaccaccaattaaagattttggtggttttaatttttcacaaatattaccagatccatcaaaaccaagcaagaggtcatttattgaagatctacttttcaacaaagtgacacttgcagatgctggcttcatcaaacaatatggtgattgccttggtgatattgctgctagagacctcatttgtgcacaaaagtttaacggccttactgttttgccacctttgctcacagatgaaatgattgctcaatacacttctgcactgttagcgggtacaatcacttctggttggacctttggtgcaggtgctgcattacaaataccatttgctatgcaaatggcttataggtttaatggtattggagttacacagaatgttctctatgagaaccaaaaattgattgccaaccaatttaatagtgctattggcaaaattcaagactcactttcttccacagcaagtgcacttggaaaacttcaagatgtggtcaaccaaaatgcacaagctttaaacacgcttgttaaacaacttagctccaattttggtgcaatttcaagtgttttaaatgatatcctttcacgtcttgacaaagttgaggctgaagtgcaaattgataggttgatcacaggcagacttcaaagtttgcagacatatgtgactcaacaattaattagagctgcagaaatcagagcttctgctaatcttgctgctactaaaatgtcagagtgtgtacttggacaatcaaaaagagttgatttttgtggaaagggctatcatcttatgtccttccctcagtcagcacctcatggtgtagtcttcttgcatgtgacttatgtccctgcacaagaaaagaacttcacaactgctcctgccatttgtcatgatggaaaagcacactttcctcgtgaaggtgtctttgtttcaaatggcacacactggtttgtaacacaaaggaatttttatgaaccacaaatcattactacagacaacacatttgtgtctggtaactgtgatgttgtaataggaattgtcaacaacacagtttatgatcctttgcaacctgaattagactcattcaaggaggagttagataaatattttaagaatcatacatcaccagatgttgatttaggtgacatctctggcattaatgcttcagttgtaaacattcaaaaagaaattgaccgcctcaatgaggttgccaagaatttaaatgaatctctcatcgatctccaagaacttggaaagtatgagcagtatataaaatggccatggtacatttggctaggttttatagctggcttgattgccatagtaatggtgacaattatgctttgctgtatgaccagttgctgtagttgtctcaagggctgttgttcttgtggatcctgctgcaaatttgatgaagacgactctgagccagtgctcaaaggagtcaaattacattacacataaacgaacttatggatttgtttatgagaatcttcacaattggaactgtaactttgaagcaaggtgaaatcaaggatgctactccttcagattttgttcgcgctactgcaacgataccgatacaagcctcactccctttcggatggcttattgttggcgttgcacttcttgctgtttttcagagcgcttccaaaatcataaccctcaaaaagagatggcaactagcactctccaagggtgttcactttgtttgcaacttgctgttgttgtttgtaacagtttactcacaccttttgctcgttgctgctggccttgaagccccttttctctatctttatgctttagtctacttcttgcagagtataaactttgtaagaataataatgaggctttggctttgctggaaatgccgttccaaaaacccattactttatgatgccaactattttctttgctggcatactaattgttacgactattgtataccttacaatagtgtaacttcttcaattgtcattacttcaggtgatggcacaacaagtcctatttctgaacatgactaccagattggtggttatactgaaaaatgggaatctggagtaaaagactgtgttgtattacacagttacttcacttcagactattaccagctgtactcaactcaattgagtacagacactggtgttgaacatgttaccttcttcatctacaataaaattgttgatgagcctgaagaacatgtccaaattcacacaatcgacgtttcatccggagttgttaatccagtaatggaaccaatttatgatgaaccgacgacgactactagcgtgcctttgtaagcacaagctgatgagtacgaacttatgtactcattcgtttcggaagagacaggtacgttaatagttaatagcgtacttctttttcttgctttcgtggtattcttgctagttacactagccatccttactgcgcttcgattgtgtgcgtactgctgcaatattgttaacgtgagtcttgtaaaaccttctttttacgtttactctcgtgttaaaaatctgaattcttctagagttcctgatcttctggtctaaacgaactaaatattatattagtttttctgtttggaactttaattttagccatggcagattccaacggtactattaccgttgaagagcttaaaaagctccttgaacaatggaacctagtaataggtttcctattccttacatggatttgtcttctacaatttgcctatgccaacaggaataggtttttgtatataattaagttaattttcctctggctgttatggccagtaactttagcttgttttgtgcttgctgctgtttacagaataaattggatcaccggtggaattgctatcgcaatggcttgtcttgtaggcttgatgtggctcagctacttcattgcttctttcagactgtttgcgcgtacgcgttccatgtggtcattcaatccagaaactaacattcttctcaacgtgccactccatggcactattctgaccagaccgcttctagaaagtgaactcgtaatcggagctgtgatccttcgtggacatcttcgtattgctggacaccatctaggacgctgtgacatcaaggacctgcctaaagaaatcactgttgctacatcacgaacgctttcttattacaaattgggagcttcgcagcgtgtagcaggtgactcaggttttgctgcatacagtcgctacaggattggcaactataaattaaacacagaccattccagtagcagtgacaatattgctttgcttgtacagtaagtgacaacagatgtttcatctcgttgactttcaggttactatagcagagatattactaattattatgaggacttttaaagtttccatttggaatcttgattacatcataaacctcataattaaaaatttatctaagtcactaactgagaataaatattctcaattagatgaagagcaaccaatggagattgattaaacgaacatgaaaattattcttttcttggcactgataacactcgctacttgtgagctttatcactaccaagagtgtgttagaggtacaacagtacttttaaaagaaccttgctcttctggaacatacgagggcaattcaccatttcatcctctagctgataacaaatttgcactgacttgctttagcactcaatttgcttttgcttgtcctgacggcgtaaaacacgtctatcagttacgtgccagatcagtttcacctaaactgttcatcagacaagaggaagttcaagaactttactctccaatttttcttattgttgcggcaatagtgtttataacactttgcttcacactcaaaagaaagacagaatgattgaactttcattaattgacttctatttgtgctttttagcctttctgctattccttgttttaattatgcttattatcttttggttctcacttgaactgcaagatcataatgaaacttgtcacgcctaaacgaacatgaaatttcttgttttcttaggaatcatcacaactgtagctgcatttcaccaagaatgtagtttacagtcatgtactcaacatcaaccatatgtagttgatgacccgtgtcctattcacttctattctaaatggtatattagagtaggagctagaaaatcagcacctttaattgaattgtgcgtggatgaggctggttctaaatcacccattcagtacatcgatatcggtaattatacagtttcctgtttaccttttacaattaattgccaggaacctaaattgggtagtcttgtagtgcgttgttcgttctatgaagactttttagagtatcatgacgttcgtgttgttttagatttcatctaaacgaacaaactaaaatgtctgataatggaccccaaaatcagcgaaatgcaccccgcattacgtttggtggaccctcagattcaactggcagtaaccagaatggagaacgcagtggggcgcgatcaaaacaacgtcggccccaaggtttacccaataatactgcgtcttggttcaccgctctcactcaacatggcaaggaagaccttaaattccctcgaggacaaggcgttccaattaacaccaatagcagtccagatgaccaaattggctactaccgaagagctaccagacgaattcgtggtggtgacggtaaaatgaaagatctcagtccaagatggtatttctactacctaggaactgggccagaagctggacttccctatggtgctaacaaagacggcatcatatgggttgcaactgagggagccttgaatacaccaaaagatcacattggcacccgcaatcctgctaacaatgctgcaatcgtgctacaacttcctcaaggaacaacattgccaaaaggcttctacgcagaagggagcagaggcggcagtcaagcctcttctcgttcctcatcacgtagtcgcaacagttcaagaaattcaactccaggcagcagtaggggaacttctcctgctagaatggctggcaatggcggtgatgctgctcttgctttgctgctgcttgacagattgaaccagcttgagagcaaaatgtctggtaaaggccaacaacaacaaggccaaactgtcactaagaaatctgctgctgaggcttctaagaagcctcggcaaaaacgtactgccactaaagcatacaatgtaacacaagctttcggcagacgtggtccagaacaaacccaaggaaattttggggaccaggaactaatcagacaaggaactgattacaaacattggccgcaaattgcacaatttgcccccagcgcttcagcgttcttcggaatgtcgcgcattggcatggaagtcacaccttcgggaacgtggttgacctacacaggtgccatcaaattggatgacaaagatccaaatttcaaagatcaagtcattttgctgaataagcatattgacgcatacaaaacattcccaccaacagagcctaaaaaggacaaaaagaagaaggctgatgaaactcaagccttaccgcagagacagaagaaacagcaaactgtgactcttcttcctgctgcagatttggatgatttctccaaacaattgcaacaatccatgagcagtgctgactcaactcaggcctaaactcatgcagaccacacaaggcagatgggctatataaacgttttcgcttttccgtttacgatatatagtctactcttgtgcagaatgaattctcgtaactacatagcacaagtagatgtagttaactttaatctcacatagcaatctttaatcagtgtgtaacattagggaggacttgaaagagccaccacattttcaccgaggccacgcggagtacgatcgagtgtacagtgaacaatgctagggagagctgcctatatggaagagccctaatgtgtaaaattaattttagtagtgctatccccatgtgattttaatagcttcttaggagaat

SEQ ID NO: 61 - DNA, 5889 bp, Artificial Sequence
  pcDNA3.1/Hygro(+)_ORF7a
gacggatcgggagatctcccgatcccctatggtcgactctcagtacaatctgctctgatgccgcatagttaagccagtatctgctccctgcttgtgtgttggaggtcgctgagtagtgcgcgagcaaaatttaagctacaacaaggcaaggcttgaccgacaattgcatgaagaatctgcttagggttaggcgttttgcgctgcttcgcgatgtacgggccagatatacgcgttgacattgattattgactagttattaatagtaatcaattacggggtcattagttcatagcccatatatggagttccgcgttacataacttacggtaaatggcccgcctggctgaccgcccaacgacccccgcccattgacgtcaataatgacgtatgttcccatagtaacgccaatagggactttccattgacgtcaatgggtggactatttacggtaaactgcccacttggcagtacatcaagtgtatcatatgccaagtacgccccctattgacgtcaatgacggtaaatggcccgcctggcattatgcccagtacatgaccttatgggactttcctacttggcagtacatctacgtattagtcatcgctattaccatggtgatgcggttttggcagtacatcaatgggcgtggatagcggtttgactcacggggatttccaagtctccaccccattgacgtcaatgggagtttgttttggcaccaaaatcaacgggactttccaaaatgtcgtaacaactccgccccattgacgcaaatgggcggtaggcgtgtacggtgggaggtctatataagcagagctctctggctaactagagaacccactgcttactggcttatcgaaattaatacgactcactatagggagacccaagctggctagcgccaccatgaaaattattcttttcttggcactgataacactcgctacttgtgagctttatcactaccaagagtgtgttagaggtacaacagtacttttaaaagaaccttgctcttctggaacatacgagggcaattcaccatttcatcctctagctgataacaaatttgcactgacttgctttagcactcaatttgcttttgcttgtcctgacggcgtaaaacacgtctatcagttacgtgccagatcagtttcacctaaactgttcatcagacaagaggaagttcaagaactttactctccaatttttcttattgttgcggcaatagtgtttataacactttgcttcacactcaaaagaaagacagaatgactcgagtctagagggcccgtttaaacccgctgatcagcctcgactgtgccttctagttgccagccatctgttgtttgcccctcccccgtgccttccttgaccctggaaggtgccactcccactgtcctttcctaataaaatgaggaaattgcatcgcattgtctgagtaggtgtcattctattctggggggtggggtggggcaggacagcaagggggaggattgggaagacaatagcaggcatgctggggatgcggtgggctctatggcttctgaggcggaaagaaccagctggggctctagggggtatccccacgcgccctgtagcggcgcattaagcgcggcgggtgtggtggttacgcgcagcgtgaccgctacacttgccagcgccctagcgcccgctcctttcgctttcttcccttcctttctcgccacgttcgccggctttccccgtcaagctctaaatcggggcatccctttagggttccgatttagtgctttacggcacctcgaccccaaaaaacttgattagggtgatggttcacgtagtgggccatcgccctgatagacggtttttcgccctttgacgttggagtccacgttctttaatagtggactcttgttccaaactggaacaacactcaaccctatctcggtctattcttttgatttataagggattttggggatttcggcctattggttaaaaaatgagctgatttaacaaaaatttaacgcgaattaattctgtggaatgtgtgtcagttagggtgtggaaagtccccaggctccccaggcaggcagaagtatgcaaagcatgcatctcaattagtcagcaaccaggtgtggaaagtccccaggctccccagcaggcagaagtatgcaaagcatgcatctcaattagtcagcaaccatagtcccgcccctaactccgcccatcccgcccctaactccgcccagttccgcccattctccgccccatggctgactaattttttttatttatgcagaggccgaggccgcctctgcctctgagctattccagaagtagtgaggaggcttttttggaggcctaggcttttgcaaaaagctcccgggagcttgtatatccattttcggatctgatcagcacgtgatgaaaaagcctgaactcaccgcgacgtctgtcgagaagtttctgatcgaaaagttcgacagcgtctccgacctgatgcagctctcggagggcgaagaatctcgtgctttcagcttcgatgtaggagggcgtggatatgtcctgcgggtaaatagctgcgccgatggtttctacaaagatcgttatgtttatcggcactttgcatcggccgcgctcccgattccggaagtgcttgacattggggaattcagcgagagcctgacctattgcatctcccgccgtgcacagggtgtcacgttgcaagacctgcctgaaaccgaactgcccgctgttctgcagccggtcgcggaggccatggatgcgatcgctgcggccgatcttagccagacgagcgggttcggcccattcggaccgcaaggaatcggtcaatacactacatggcgtgatttcatatgcgcgattgctgatccccatgtgtatcactggcaaactgtgatggacgacaccgtcagtgcgtccgtcgcgcaggctctcgatgagctgatgctttgggccgaggactgccccgaagtccggcacctcgtgcacgcggatttcggctccaacaatgtcctgacggacaatggccgcataacagcggtcattgactggagcgaggcgatgttcggggattcccaatacgaggtcgccaacatcttcttctggaggccgtggttggcttgtatggagcagcagacgcgctacttcgagcggaggcatccggagcttgcaggatcgccgcggctccgggcgtatatgctccgcattggtcttgaccaactctatcagagcttggttgacggcaatttcgatgatgcagcttgggcgcagggtcgatgcgacgcaatcgtccgatccggagccgggactgtcgggcgtacacaaatcgcccgcagaagcgcggccgtctggaccgatggctgtgtagaagtactcgccgatagtggaaaccgacgccccagcactcgtccgagggcaaaggaatagcacgtgctacgagatttcgattccaccgccgccttctatgaaaggttgggcttcggaatcgttttccgggacgccggctggatgatcctccagcgcggggatctcatgctggagttcttcgcccaccccaacttgtttattgcagcttataatggttacaaataaagcaatagcatcacaaatttcacaaataaagcatttttttcactgcattctagttgtggtttgtccaaactcatcaatgtatcttatcatgtctgtataccgtcgacctctagctagagcttggcgtaatcatggtcatagctgtttcctgtgtgaaattgttatccgctcacaattccacacaacatacgagccggaagcataaagtgtaaagcctggggtgcctaatgagtgagctaactcacattaattgcgttgcgctcactgcccgctttccagtcgggaaacctgtcgtgccagctgcattaatgaatcggccaacgcgcggggagaggcggtttgcgtattgggcgctcttccgcttcctcgctcactgactcgctgcgctcggtcgttcggctgcggcgagcggtatcagctcactcaaaggcggtaatacggttatccacagaatcaggggataacgcaggaaagaacatgtgagcaaaaggccagcaaaaggccaggaaccgtaaaaaggccgcgttgctggcgtttttccataggctccgcccccctgacgagcatcacaaaaatcgacgctcaagtcagaggtggcgaaacccgacaggactataaagataccaggcgtttccccctggaagctccctcgtgcgctctcctgttccgaccctgccgcttaccggatacctgtccgcctttctcccttcgggaagcgtggcgctttctcaatgctcacgctgtaggtatctcagttcggtgtaggtcgttcgctccaagctgggctgtgtgcacgaaccccccgttcagcccgaccgctgcgccttatccggtaactatcgtcttgagtccaacccggtaagacacgacttatcgccactggcagcagccactggtaacaggattagcagagcgaggtatgtaggcggtgctacagagttcttgaagtggtggcctaactacggctacactagaaggacagtatttggtatctgcgctctgctgaagccagttaccttcggaaaaagagttggtagctcttgatccggcaaacaaaccaccgctggtagcggtggtttttttgtttgcaagcagcagattacgcgcagaaaaaaaggatctcaagaagatcctttgatcttttctacggggtctgacgctcagtggaacgaaaactcacgttaagggattttggtcatgagattatcaaaaaggatcttcacctagatccttttaaattaaaaatgaagttttaaatcaatctaaagtatatatgagtaaacttggtctgacagttaccaatgcttaatcagtgaggcacctatctcagcgatctgtctatttcgttcatccatagttgcctgactccccgtcgtgtagataactacgatacgggagggcttaccatctggccccagtgctgcaatgataccgcgagacccacgctcaccggctccagatttatcagcaataaaccagccagccggaagggccgagcgcagaagtggtcctgcaactttatccgcctccatccagtctattaattgttgccgggaagctagagtaagtagttcgccagttaatagtttgcgcaacgttgttgccattgctacaggcatcgtggtgtcacgctcgtcgtttggtatggcttcattcagctccggttcccaacgatcaaggcgagttacatgatcccccatgttgtgcaaaaaagcggttagctccttcggtcctccgatcgttgtcagaagtaagttggccgcagtgttatcactcatggttatggcagcactgcataattctcttactgtcatgccatccgtaagatgcttttctgtgactggtgagtactcaaccaagtcattctgagaatagtgtatgcggcgaccgagttgctcttgcccggcgtcaatacgggataataccgcgccacatagcagaactttaaaagtgctcatcattggaaaacgttcttcggggcgaaaactctcaaggatcttaccgctgttgagatccagttcgatgtaacccactcgtgcacccaactgatcttcagcatcttttactttcaccagcgtttctgggtgagcaaaaacaggaaggcaaaatgccgcaaaaaagggaataagggcgacacggaaatgttgaatactcatactcttcctttttcaatattattgaagcatttatcagggttattgtctcatgagcggatacatatttgaatgtatttagaaaaataaacaaataggggttccgcgcacatttccccgaaaagtgccacctgacgtc
